United States Patent Application Publication US 2024/0180975 A1 - sequence listing, part 4

SEQ ID NO: 2 - DNA, 4708953 bp, Chryseobacterium massiliae (residues 1-1,569,651 of 4,708,953)
  misc_feature (1)..(10): Whole genome sequence of Chryseobacterium massiliae strain with Accession Number No. I-5479 deposited at the CNCM on January 24, 2020 (UGB 3610)
  misc_feature (52128)..(52227): n is a, c, g, or t
  misc_feature (57176)..(57275): n is a, c, g, or t
  misc_feature (127328)..(127427): n is a, c, g, or t
  misc_feature (264557)..(264656): n is a, c, g, or t
  misc_feature (577519)..(577618): n is a, c, g, or t
  misc_feature (832056)..(832155): n is a, c, g, or t
  misc_feature (1015295)..(1015394): n is a, c, g, or t
  misc_feature (1148193)..(1148292): n is a, c, g, or t
  misc_feature (1240204)..(1240303): n is a, c, g, or t
  misc_feature (1322067)..(1322166): n is a, c, g, or t
  misc_feature (1422620)..(1422719): n is a, c, g, or t
  misc_feature (1441272)..(1441371): n is a, c, g, or t
  misc_feature (1535166)..(1535265): n is a, c, g, or t
  misc_feature (1604409)..(1604508): n is a, c, g, or t
  misc_feature (1841729)..(1841828): n is a, c, g, or t
  misc_feature (2034579)..(2034678): n is a, c, g, or t
  misc_feature (2097389)..(2097488): n is a, c, g, or t
  misc_feature (2122447)..(2122546): n is a, c, g, or t
  misc_feature (2149320)..(2149419): n is a, c, g, or t
  misc_feature (2241640)..(2241739): n is a, c, g, or t
  misc_feature (2418169)..(2418268): n is a, c, g, or t
  misc_feature (2526058)..(2526157): n is a, c, g, or t
  misc_feature (2600368)..(2600467): n is a, c, g, or t
  misc_feature (2645520)..(2645619): n is a, c, g, or t
  misc_feature (2702878)..(2702977): n is a, c, g, or t
  misc_feature (2743425)..(2743524): n is a, c, g, or t
  misc_feature (2769562)..(2769661): n is a, c, g, or t
  misc_feature (2791670)..(2791769): n is a, c, g, or t
  misc_feature (2831479)..(2831578): n is a, c, g, or t
  misc_feature (2892648)..(2892747): n is a, c, g, or t
  misc_feature (2907074)..(2907173): n is a, c, g, or t
  misc_feature (2982010)..(2982109): n is a, c, g, or t
  misc_feature (2998194)..(2998293): n is a, c, g, or t
  misc_feature (3058467)..(3058566): n is a, c, g, or t
  misc_feature (3085967)..(3086066): n is a, c, g, or t
  misc_feature (3104907)..(3105006): n is a, c, g, or t
  misc_feature (3120891)..(3120990): n is a, c, g, or t
  misc_feature (3215008)..(3215107): n is a, c, g, or t
  misc_feature (3325682)..(3325781): n is a, c, g, or t
  misc_feature (3726420)..(3726519): n is a, c, g, or t
  misc_feature (3782267)..(3782366): n is a, c, g, or t
  misc_feature (3825410)..(3825509): n is a, c, g, or t
  misc_feature (3899108)..(3899207): n is a, c, g, or t
  misc_feature (3942556)..(3942655): n is a, c, g, or t
  misc_feature (4030724)..(4030823): n is a, c, g, or t
  misc_feature (4087928)..(4088027): n is a, c, g, or t
  misc_feature (4137347)..(4137446): n is a, c, g, or t
  misc_feature (4183291)..(4183390): n is a, c, g, or t
  misc_feature (4206113)..(4206212): n is a, c, g, or t
  misc_feature (4270010)..(4270109): n is a, c, g, or t
  misc_feature (4346130)..(4346229): n is a, c, g, or t
  misc_feature (4353347)..(4353446): n is a, c, g, or t
  misc_feature (4401203)..(4401302): n is a, c, g, or t
  misc_feature (4438546)..(4438645): n is a, c, g, or t
  misc_feature (4465525)..(4465624): n is a, c, g, or t
  misc_feature (4469805)..(4469904): n is a, c, g, or t
  misc_feature (4473602)..(4473701): n is a, c, g, or t
  misc_feature (4591584)..(4591683): n is a, c, g, or t
  misc_feature (4597196)..(4597295): n is a, c, g, or t
  misc_feature (4620362)..(4620461): n is a, c, g, or t
  misc_feature (4629512)..(4629611): n is a, c, g, or t
  misc_feature (4635880)..(4635979): n is a, c, g, or t
  misc_feature (4654440)..(4654539): n is a, c, g, or t
  misc_feature (4702440)..(4702539): n is a, c, g, or t
  misc_feature (4705724)..(4705823): n is a, c, g, or t
ttcagattctattatatctttgtctagtacttcgtacatgggctgggaaatttaagttttttttgcaaatacaatatcttaaatctcagccttttttccaaagaaaaaagtttaaatgacttcatttaatgctataggtgttaaaggaggttatcaatatattacaaatattaactaatctcaaaaaacgatacatactcgacataacataggtgattccaattgatcgtagatggtgacatcgtagtggatcagatgctcagaatttggcagaccctgtgaaataatataatcggaggctaccccatacctttttggaaggaagttgctgagccatctcctgaattctgcttcggcaacaataccctgccgtacttttacctctcttttttcgctgtgtattttagcgttgtctacgcagcaagaatctctgctctcgcaataagaaaccgtttccataccagattggagatctggagcatgagtttagattgagcgtttttcatagaatatagtgtgctctctaattttagatcatttcttattatcgttatttatattgtaatagctaatgctaaataaacagctaaataaaagaatcaaagttgaaattactactcaaaatcttattaattaaaatttttaaagtaaatttaatccttaaaaacgatttcattttaaaatttagagcgaaatatcgcgagcattatggaaataagcgaaatatttgaaaattacataaagattgaaccaaaggttatgtcaattgaaagcctttttaataatgaagagagggttagcaaaacaaactacaaaccattttatcaacgaaattatgtatgggatgatgaaaaggcaacttatttcattgaaagtattttacttggaacagaaataccaccgctaatttatttcagaaattcagaaggaactgagatagtggacggcaggcagcgctatgagactattttaagatttatagaaaacgactttaagttaaggaagaatggtttacaaaaacttgaaaacataggaatagctaataaatcttttaaaaatattgatgataagcttcaagaacttttttgggacactaaactcaggataattgaatttagttttcattcaaaatcactaattaatgacgaatatgaggacatcgttaaaaaagaaatttttaaacgctataactccggaattactcctttaaaacctaccgaaattgataaggccgcatatattgaagatgatttaaacagctatttcaagagaaaattaaatagtgattcagtattatatggagacgtttccagcttattatattttgaaaaaagcaatattgaagtaatactgaaaaaaataagacagcttctggtattgcacaacattcctataaaatatttttcgattaagaaagatgctattattgcaaaatatttcgactttttattcaacagcctaaacgaatcaggaattgaaaacgtttttgatggctttgtagcgaaaataaatcagcttaaaaaacttagaaattatttaaaagaagaccataatacaacatacaataggttgatttttgagtgcgtgtattgggctctatctgttttggaagtggagacccaatcaagagtaggtctatcagattcccttttaagaaaactggcaagctatatttccttaaataaggatgcatataagatggagcgaagttcattttcaaagcagctccatcatagattccaggttacttctatatttttcagtgaaaacttagcaattgactttgcagcttaccttcagaacaatgctgactttaaattgaaaacccaagagttagagccgaaagattctgaaatgataggatttgaggaactaagaataaataaacctgagccctcttcaattgcaatcgatgatatttgtaggcaaatggaaaagcaaaggttcctgatacgtccgccttatcagcgcaatgaggtaatcaataaaaagaaatcctcggcaatcattgaaagtattttgatgggtattaaattgccgccgatctttgtgtttaaacgcaaagatgaaatatcagaagttctagatggccaacaacgcttgttatcaattttaggatttatccgtaagccctatttagatgaaaacaatgttaagcaatattctagtaaagatggatatacactaaacctaaaaaatggtatcctcaaaacactcaatgggaagtcatttgaaggtctttcaaaagaacataaggataagatcaaaaattttgatttgtggatcattgaaatcaatgaaaaaaacaatgaacatttcgatcctatagatttatttattagactaaataacaaaccgtaccctatcaaagaagatacttttgagatgtggaattcgtacatttcaagagatattatcgaatcgataaaagctgttcataaaaacaataaagactggttctactttaggaagaataattcaagaatggaagatgaaaatatttactcttcacttattttccttcagtaccaaaaaattaaaaacgagcggtctgatgttgaaaaagttaaggatctcgacatatacaaaattggtgacaaaatcaatttacgactgaagtcaaagaacgaaatcactaagattctcgaaaataatgaattcaaaaatgagtttatcaattccatatttgactttgagtttgatttcttaaaaaaactaaagattgtactcagcgacaaagaatcgacttcgcagtctattagcggtatgctcgacagtatttttggaaaggaaaacaatcgaaggacacaacagagtttttatgcaatctggtattttattaatgatataccactaagagatcttgaaaacaaaaagattgaagctagagatggactaaaacatctattccgattaatggatgatgtagtcagcaagggagagtttgaaaacaaagttgaaaactttaaaaaaggattgacttcagatgatcgttcaaattttaaaagtgtttttgacatctaccgtgtagctccggtaaagttgtcagacattgcagaaattcatttaggtattaattctaacttacttaaaaagtataataaaaatactgattctaatccgatagagtacatcaaggatgctaaaatgagtttccttaatgtgaaaccagttggcagcacaacctttgttgctttggacgatcgccctgacgaggtaagaaatttctacgagagtacaaataagattgttgtcagaaaaaatatcataaataaccggaggctagcagtcggattgatttcgcaaaaagctgtatttggaaataatactataatgctaaccatcaaaagaaatggttatgatgctaaatttattacctctattttatcaagctcattaattggttatttaagttattcgaatgctactggcacaagtactgccctacagatatcgtcgcatttcgtccgagaaattccaatacctctggttagcatagaggaacaacttcctttgatcagaatgtttgagtatataagttatctttctgacgattcaacatttcagggatttttcattcgtctcatagatgctttaacctacgaaatatattttaaagaagagtttgaaaaacagagccttagcttttcagcgtatcttagtgatttacccgcaattcatgacgcagaaaatccaagcggtttgttgaaggatatttatgaatgtttaagtagttccactcatcctatcagctcctcactctatcgacttcttaccttaaaacttgttgaagaagttgaaggtattgtttaacctcagtccaatctaataacaattatcttgaaaagaataacatcaattcaattagagaattatcgtgcatttcataataactatagcgagattgatatccccaaaggtcagaatgttttgatctatggggaaaacggtagcggcaaaagctctatgttcaaagcattgaacgattttattactagctctagattacagaagacttttaccaccaaccgttactcccaaaatattcacggtaaaattgagattaaattcgctgatttttcgaccaacccatggactgagctgccaaatacaacacagtcatttatattttctgatacagcatccccgaaccaaacaggcttcctccaggcagcctctttagcgaaaggttttttagagtacagagacctgcttgacgtttatcttcataaagaagcaagaccaaatctattcgatcttatagttaaaacactccttgctaactacattccaattaattttggagcatcctaccgcctgggggtcaaatggaaccaattacaaaaaaaattaatcgacgagagctacactaggctggatcgcaatcataaaaatgcgttagtggagttagttacttatgaaaataaccttcgatcaacattagatgccatatttaatgatctcaatcagatgcttaccacttattttggagaattaagcattcagttgagttatgatctggcaccgttaaactttatttatgggagtgcaaaatgggagtggacaactcaagcagaccttcgcttgaatgtaataaaggatggtgtattgatcgttggtgattacagtgacattctgaatgaggcaagattgtcggcttttgcaatctgtttatatctggcatcccttaaacgcaatccattggtagattatcaaatactctatttggatgatatttttgtcggtctggacgcaggcaacaggcttccgatactaaagattattgagaatgaatttcaggattatcaggtttttatatcgacctatgaccggcattggtatgaactggcttctaggtatttcaaaaaaagccttcataattggctttcttttgaattttacgttgggaaaggcacagaaaacacaataatgtttgataagccaattataacaaagggtttgtctacttttgaaaaagcagtaaaatacttaaatcataatacagatcctgattatcctgccgcaggaaataactttagaaaatatttagaagagttattaccaaaatatataccaacaattgagcttactggcgtcaataaggagcagatagcagattttaaaataacaaaaatcatagaattgagtattgcctttctcaatagaacattcaacgacccaagtagtcttcaaagcatatatggtcttttacatggtttgatacatccactctctcactactctataaaaggacctgtatataaaggtgaactattgataatccaaagatctatacaaacacttgaatcgcaacttatagcactagattggcggaataactataaggtagtactggaaaaaggaaaacttattaaattaacattttgtgttgatcatgcaactaatcattacttttattatgaaatagctctaaagtctaatttctggataagaaataatccaggacaagcgccgattatatgtcacactggaggatgtcatgcagttcgctattatggccaaaataatcaagtgccatattcaggcggtagagcaaatgctaatcatgcgcactataattataactcattggaagatgcttttaatactattcaccaatatctgaatactctggttacatttccgatgccacaggcaggatatttgacctgttgcgattgggcgggtcccaacggatgggagccgctaaccaacttatttgtctggccttaaacagttttaagttcaatattttcttcagttggaaatttgaacatcatacattcgaccactttaattttaaaaaaaagaccattcttttaacattatcggattattccggtaaaatggtttttcaaaatattgatggtcaatgattttgcttatatggttgtaaattccagtactatcgaccaccaattccaattcaaggtgaccaggtaatttcggttaaattgaccacccttaaatttgataaaaactcttgtttttcatgtgtcaattagtattcaaatataataaataattactgcctgtttactcctcttttctttctcatagattccccttggagtggatggcttcaaagcactattagtaaggcttgaaaccttaaatattacatggatcagcatgcattatctagctttctctattttgtttctcagaaaaataaaagtttaaacaagtttgttgtcaaatattaaaaaactgtcaaatttcaaagaaaacgagaatttgcaaagtaaataagaatattgctatagttaatgagaataggtatattagcctattaatatgaactactttttaatagcatcattacgtaattgattactaaaaaatatgaaaaataatctagtcaactataatatttcatccgaatactttggatatattgagcatataattattgaagaattatctgaaaaaaacgaaatagatttatcaagtaatttcaaattaaataaatttttgagagaaaaaaatattcggctagatttatcggcatatatcgctaaaatgagcaaaagcggatttgttagagttgagggaacaaagctgagcttattgatggatgataattttatggattaggaatgagtttaaaaataaaacttaacatacctaaaatactgattagcttttagttgttatcgaatttcctgtattgtttccaggcatgcagacaatcatatttgggtagaaatcgaaatgttacaagttgatatgagagaagttaatcaaaagaaaatgtattttttggtgaaaagtttaatatttcttatcctcttcatcacctaatgtatctaaatctagggaatgaatttgatttaaatggcagacaattaaaaaagaaacattataattttacactttacgaatggtcgataacaactgagcctcagaagttgaaaccgatgatttataacaataatgattttaaaggatttggaaaatatttccctttcatttcttcatttattttatccataatcagtgagtatcttcacaattcttcaaaaacaaattatcaaattagtttatatacagttaaagccacaattaacggcattatgatcaatttaattaggaattaggtggtcgatagtactggaatttacaatttatcgttatcataaaatattttagagatttttctaccatacctatctttattaattttttccaaaggattgaccactttcagggcagtctactctgctaatcttaggacttcctgtttattgccttccaatagcactactactgtatcaccatctttaatccctacaactttagcttttatctgagataaaaggaatgttgaacgaaggcataatattatgggtataattcttttatcgtaacaaaattaaaagatttatttaacagcaacgaattttcttaaaatttaaattttaccactgatatacaacacattacagaattttgtaaaaaaataaaatattcattttaatacgtcaagttctgtcgctttcagcattgatatttgcattaaagaaaaacagaaatgaaacttgacattaaagctcttggtggacatcttgccggaaaccacctaaaaaaataaggctaaaacctgaagtaattctaataaaaagaaacttcaaattttaacctataaaatattcaaaacaaatttacacaaatgtctacaacaaacaatacttcgcagacactatttcgattcataagcatgagaaaccctcagcttaccgagacaaaaaaagaaaatttaggatttattcacagatcaggcttaaacacggcttttgatcaggcagtgaataacagagttggaatctctaagttacaggcattggaaaaccaatgcagatcattcccttctcctttaacggaaaaagatcttgagaacaatcaatacggatttgccacacttctgaaaataggaaggaaaatcacaaaaaaggaagttctttccaatgacgatcttagcaaaacaaaaagtgcgtattcttcaggacaaatggatttcggaaaattatgggataatctaatttatcaggtcattacccaaaaagatttttatgctaaagaagctcttgtacatattttaaaagctttgcatgtaggatacgtacagactcttgcattaacggatgatcttagaaaaataaatggatccgatctagttgctaaagcattaaatgcaaaagtagtaatgcctaaagagctttttgttgaagaaaatggttccggttcgcccacagccagtagaattgcgtcatccgagacatcagaactttcacagaaaacacaggaaagaataaaaactgatgctcaaaaagatttggtagtcactcaggctcttcttaaaaaagaacagcttgaaaaactaaacaaggagttagagaaaattcaaaaatcatatcacaacactctctctaaagaatatcaggctgcgtatgatagatacatggctgaatatgaatatcacagagaagaatctgccagaattttagacgaaattaactatttaactgagcagaaagcacctgaagaagaaataagaaaattgtatgaccgattaaaagagctggaagtccctccttttgagttttctcagcaaaatgagattaatatttatgagcttcagaaaaaattatctccggaatcatttgaactttttatgagtttgtttgcttctcaggaaatcaatcaagaattctattccaaagtatcgtctaccgataaagcagaagccatttcagacactcaattaagagtaggaacacaaacgcttcagattgatgaaagttttcagacgtatgatgatgtaatttcccaggtacaaaatcatgcttccctgactattcagacggcgttggaaaatacaactttggaacaaacacaatatgctaatataggaggtgcattaattcctattggaggagcatcaaccagaactcatttagcatacagtttattggctaactggaatagatctgcctttattccaaataatggatttattaatttctcttttgaagttcaggataattcatggaacgtcgccaatgccagaattgtattagaatccaataccggaaatcatgaagaagcattaggaaatgttgatgtgcttaacggaacggtaagttttcctgcactaatgattaataaattctcatcaattagtaaaataagaatagacgtttatttcaataatggaagagaggcttatgtagagctacttaaaattcctaataatgaacttcaggttgggttacttaccttaaagccgggtaaagaaggtccaagagaagaagaaccgggagaagaaatgtcaaccgcaagaaaactatttgggctgaaaagacttggtattgcagaatacatgaaggtcgttcagagcacccacgcctatgtacctggagatgttacgcatattgaaaacattatggcaagggaatttaagcagaaatcaaccagaaggcttagaaaaaccgaactccaaaacacatcaacaaaatcgacggaacgtgaatcgctgaccgatacaacaacgacaacaaggcatgatatgcagtcagaagttgcgaatgtgatcatgaaagatactagtgcacaagcatacgctaactggagtaaagactctgaggtttacggaagatttgaagtgggcggaagtctagccactcataacgctaaagaaaatagtgtacgacaggcagtaacccagtcacaggagatcaccaataaagcgacagacaaactccttactaaaatttctgaggaaagaatcgaaaagatcatcgaagagtatgaagaaaataatgcgcatggttttgataaccgaaatggcgataaacatgtcgtaggtgtttacagatgggtagatatgaaatataaaaaccaaatctacaactatgggaaacgtaccatgttcgaatttatgatccccgaacctgcaagattacacagattggctttggcagtagcaaaagcagatgtattaaccgcaccgatagatcccagaaaagcaccggccccttacacgatgccaaatccaaagacagccacaaaaacattgctgcaatactgggcagatgtttacggagtgacacttaccgatgaaatgccgggcaaggaagtcattcttaatgccaacgcaagccctcaaactgaaggtgaaggagtattctttgatgccaatttagagattcctgacggatataaagctactactgcatctgttgtatgggcatataataagcaaagaaacagatcgggattctttcaggggaattatattttgtcttcctatttatctttcggtaacctgaagggaggaagtttttataaagaaacccgaaatcagacccttaacggaactgaaggagtaagtggattgaatcttacaggagtattcaattacagagtatccggaaaaaacataggcggatttaatatcgctttaaaattcccatgtgttcctaatgatgcgaatgttatcgcttggcagaccgaaaactttaatgctattatcgaagcttataaagaagcttatgagaaatttaaagaagaacaggctagaatagacaaagaacagaaagagaaagaagcagaagcgaaagataaaatgaggaatttctaccgttatatggagaacgatgttcttaaacataattgtattgcctatctattgcaagattacctgtctccaaataccatagggcagaacttcactgctggtgataagatggaaaacttccaagtattcttaaacgagaatctcgataaatacaccgcactagccaaattcatggaacaggctttcgaatggagtgtcatgagctatagtttttacccatactattgggcaaacagacaacactggcaggaaatgtacatcagcgaaagtgtagatcctttattcagaagtttcttacaatcaggtatggcaagagttattgttacggtaagaccaggatttgaagatgccatccaattctttttaagcacgggtaaaatctggaacggagaagaagttcccgtaattggagatcctatgtacatgagtattatagacgaaatgagagaacctgtgggactaaaacaaggaaaaccttggattacaaaactcccaaccacacttacgatacttcaggaaggttctacgggtctgaaaacaacaacagcgttgccgtttagtcaggaaaatccggcagaatttgaaaatcctgaagaagtggtaacatcatccgagtttgccattactgatgctcaactaagctcaggagcgcaccgatttgtagaaaacatcgatatcaaagatggtaatctgcaattgaccacggatagcgatcccagaaaagtgattgcacagatctctatgcagagcattaaaaacaatcttccgtaatggtttgttaattaaaacaattattaacctgctttaggcaagtggcggctggagaaaaaccaaccgccatgagccaaaagtataaaacaaaaaatgatgacttacgaagaatatttaaacgaaatagaagattttgatgacatcacaaaacaagagcttctggcagatttccaaaactatattccaatagataatccttcaatgatgcagcaaatggggtatggcggatttcaggattttctgaaagtgaaaaatgaagctcagactatgcagctcggagaaaccataagaggaatgaataatgtgagtcccctgttagcaatggagcttaaaaatcaaaaatcgaaagaaatatcagataaatattttattgatgcttttaaagacaaatatgatgattttgatatcgtaattgatcccggatgtacagtaaatgaagaatatatcaggcaaaatttcacaaagaagaattttaactactttatagatgatgacggcaaaaaaggggaaacaagtggagatactaaagttaactttatagtatttattacaaaagatgaaaataagataaaagaagcttaccaatgcctgaaaccaagtaaaaacgagattatactttttattgaagataatgcaggagataataatggtcagctcattttggcgaaagcagatgaaggtgtgaaaaaagtttttaagcaggtaagccaaagaacgctgaatgattataagccttttcatgacatgcaaggaattctaaagcttgattataaagactggatagctttaatcttaaatggcaaactggaaggaaaagaacttgctgttgaagatataataggaagtttattgaatgtaataaaaatactttttgtgccatctaaagcattagggtggattttaaacaaaataggagatggaatagactaccttaaaatatcggatacgatttgggatacgcaatcagatgattacttttttgaaaaagagaatatcacaagttttttcacaattgacaccgcaccactagcagaactgaaaaaagctatagttaacgatccgcgacaattggaatggaatgatttgctgccaagtttcatttctgataatgctgatatatacatcagtaaactgcaggatgtaattggtaactataatacgcatataacacgacagatagaagctatttataattttcaggaacaggctgatcctattattgatattctgaacattaaagaatccatagcattttgggtaggcatgtggaacggactggtagattttgtctcttcaattttcaaatttgtaggaatagttttagaagcaccgttcgaaatttttgataactttgacaaaattgtagatggaataagccagctattttcttcactaagcaatattaatatttctgatgagttggtgaaagcgtatgctaacataaagaaatacttgagtgagaaagatgcagacgatatagattggattcgggtagcatatatctccggttttggtttaatgtttatattaaccttctttattccatatgccaatattgctaagctggcaagtattgggaaatttgggaaaatgggggtaatcattgctgaagttttagaaggaacaggaaaagctttaggcacagttactcgggaagcgaaagaactggcaagcgatatttggagagcgctgacttctttaatggaaatccttaaacgaggaggagcgaaactacaagaactatttgaaaagatttctaaagaaattatagattggtttcttaaaaacaagaaagctctttctctttatgaaggtgggatttttagaagtaggttagctaaagctgttgccatggctttagatgatgccccaaagtttattaagcaatatgaacgtgcttttcttgaaatggaagaattgctggaaagagaaatggcagctatcataacagaaagtggggaaacaattggtgcaattactgatggggctaaaaagagtgttgatctttccaaatattttaagaaattaaaaaatgcgattgttacccataatcacccactgggaagcagtttaagcccaggtgatattaaaatgtttatcgatcatggtataaaagagcttcgtgcaattgctatgactgacggaaccattttttctcttaaaagaataggaaatttgacaaaatcagaaattaaagatgttgaaatgggagttaaaaatgctgttgaagagcttacgaaaaatggaaccgtagaaaaacatgcattggaaagattcaaagcggatatgtatattcgagaattgaataaaacgggaaaaatagagtatataaaataccagccataaaaatttaaaaattatgataacagaaaaagattatgaagttttatattatattactccagtaaaatatagaggcaaattagacggagacagtgatcctaacgaaatgattaatttcagaaaagagaaagagttaggaaaaaaaatgatccaatgcagtaagacagaatttataggaacagtggtcaaaatctttaaaaataaatatgctaatgcatggtctataagagggcatataagagaatatgatctagctacaaaacaagaaaccattttaagaaaagatttgaaaaaattagtttttgacttcaaagatggtgttgataatagcttcatcgcagacgacgaatatctggataacttatttatagaattcgacatttcagtaaatggtttggtaaatactgtgaaaacagccttgcaaggcaagtcatttacagaatctaccaataatggaaaaaccatttttgaagtaaacaatagtcctattctaaaaatagaaactactcctacaacatttcatatgttcatagacaaagattcttttattgactatggaacctaggaattatagcagtcttcggactgcttttttagtttttataaaaaagctaagagccagctaatgatatttagggagcgttgacttctctaatggaaatccttaaacgaggtggggctataattcaagaaattgtaaagtggtttttgaagagtaaaggaaagtaatgatgaattaaaaaaaatgaaaaaaatagatttaatgatcccaatttgtacactatataactttaaaaacactagtgatatagtgttaaaaattgatgattcggaatacttaaaaaatgtatatgatcttgaacaaagaaaaagtatatataatgcattgaaataggcaaaagaaaatcctaactttgatttcaaaggaataatgaaggatgctcctctttctcacgaattaactttttccaatttagatatacataattatttaatgtttttaaaaaatttcatggaaaatcaggaatataaacttttaacagatgatcgaccgccaaaaaaaataccatatggaaaataactcctaaagcatagttttaagccactttaaagaggctttttaaattgtctttcaatctgtataagcatttaccgaagctggaaaaacttatcaaattgaccacccataatttgggttaaatttgagataaaaattactttattttttcatgatgttaggggcatacgttcgtaaaataaatgcttgcaaaagaatagagatattctagtaactaaggctcaatctcctcaaatccttctgcaaaaaaatctttcatagtaattccaagtgcagtaatcactttagataatgaactaaagcgcaagtcctcacctttttcatatctgccatattgagctctggaaatattatgttcatatgcgaaatattcgtagctcgaataacctttggcaattctcagttcctttattcttttccctagctttttcagaagttcttcttttgaaaaatcgctttcttccatgcttatctacttagagactacaaatgttataaataagcactgaatatgttaccactaaaaagatgtatctaattagtagcttttttgattttaatttttatatttgaaacttattttaattaaccatccttgtttaggatattattttctaacaatcaaatgccttaatatgttattattactttctacaacaactacaaaagctgatggctcgttgttcttcaagataattttatttatatattttattccgtcaatgattgctttaattagaataccgcttataaagtttaaatttattaccgttttactgattaatctattttttggatggagcgtttatgggtggtggatagcattttacaaagctgtatcaagtgcgaaaggttaagtttggctcaatcttaaatgagaaagttatttattcaaattaattaaagcacttatcagattatggtaaaagtggtcttaaaaatacctaaaaacgaaattaatcctctattaagtaaactagcaaaactgggggttaaagacataaaaattaaagaaaagagtaaaaagattaacatttttagatataaaaacacggttgaaaacctagaaaaagagttagaaaaataattctactatcattcataagaatacgagaaaatagcctctaattttttttgaacgttgcgatagcataagtcagatactcttttttcaaacactgtaccatcttctttaatttctttctcttctaatcgagttccccctttgttatagttagttgattgtgcgagcagtattccagaagattcttttgaatcgactatttttttccaattgtagctaaaatcctttacagtttttgagatattatttaatgcaatattatctatctcgcctaaattagctttatgaaaaatttgaatgcgattactatggcaatcagatcccaaatatgcggtgtaaccagaatgatttatcagtttatagattttaatttttttgttatcaatttcttctctcattaccctaaatcttactttcaatttttccacaattgattttatcataagaaatgaattttcataatcgtcatttttatcattattatcttcttcttttttacctccagaaagacctccagaatttgaatttggatctggaattattctattaaatgtaccaaattgagagtctttcgggtaaagaggtggattgccgtttcctttttctgaatttttatgaactattgaaaggtttacaattccgcttaaaaggttgtttccagattggatgaaactttcggctaagttatcgtttaccccttctttcgtaaccgtggagctttttttcttctttcttctttttataggaaaactccctgtgtttgatacagatggattttcagatgttttattggattgtgagctgtcaaagaacacaatattgtcagtttcataaagatctttaaaattattctcatgtttgacttcaactatttcacttgcaataaaaaatgttttatcacctacatttttgtaactaccagttatgactagctctaatttttcttttatagggactatgaaattgtaaagatttttagcactgtcggatataactttttgatagagattagcttgcattttagttaagttcatcatcagataatcatcttttgaaaataagaaaaatgacagtgcttttgccattgattttacttcagcagtgccagtcttttttaatgaaatttcaccaattttcaaattatctatttcctttttgctccattcaattaaatctgttaaacctgttaaatctgcttgaaagagattctttattattaaactatttaccaagaaaaaagcttgaccaattactacagatggaataattacatttattggctcattctctttattccttttttcaaaagcataatatttagttccaatcgattttggtgaattgaacaataagtcattcttttgggatgtcacaaaattgcagttttgatagctttcaagtgaaactgaaaaaaggtattttttattctttaatttttctcccttaaaattgaatctatctccaattttaagaagcaataagttttcaatatttacgctatcataatcgatatattgagttttttcaacaggatacccattttcatactctacgataatgtgttcaaattcaatctcggtataaatctcaagattagaattcttaaaccaataaggaaagttaactattttataataaccctcagaaattggagggagatcaaatttgaagatcataagataaacaattagattactgtatatgattttgaattttatagctatgaactctcgatctataattttcatcggctatacaattttccataggaattaaattacgatccaataaatttgctgtaccccataattcaatattcaaattgggtaatttatagagataaacctttctgcatttttcaagttctcttaatgctaaatctacctcttttgaagtaaattttataacattttttttagcagaaagtattgaaaaaatttgatcagccgtaaagaatttttcagcttgctttatcagatatttgatgtcattttcaagtgagtaaacataaatatcgttacctgaaattacgtttttaatcttctgattgttagttaataaacttatttttttttgtttattctcattgcagagccttattgaatttctcaagcgagaaataattgattttttttgtaaaaattgtttgaattttagcataatatatttttttattgattttaaatctatatatttgctacaacaaaataagggtgacggataaaagatttttcctttaccattatctaatgtaacataaaaatccactatagtaatttcgagttcttttagtgggttttcttttttatttattcttatatattcaattgtgaattacgcaaatatactgaataatttctttcaaaaaaatagtaaatcaatcttctctatttcgaaattttatttcggattactatttatatcatattaaatatactaaatataccaaatatactaaatattttgagtgtttatgtttattatagtcaaaaaagactatataagcaatattgaattaatgtcaatataaatggctaaaaataattaaaggaataatacaattcttaatatttttcttgtaaacttttacaaatgctattgatctttaaaaattttttcaaaggaataaggaaggatataatccttattaaattcactaagtcgcagattatagttgactattagatatttcaagaaactataatcatttataattttacatgtaatttcaaataatggaaatctttcttcaattgaccaaaaataaaaattctgatctttttccggaagaacaccaaattcagattcacaagcttttctcagacgtccccaagtatgatttcttcttgataaaagattcataatgttttgaaaaagatagaagtaattaaagctgtactgaatatggtttgaataaccagcttgtagaatgttattaatatttgattggtttaaaagttgaatttctgttgctttgactgaattctctgtcaaatcataattacaatttgagcataaacttaaagatgatatcataactgtgtttttgttgccctgttctaacctgtgaaatactattggctttttacattccgggcagcaatctttgagaagtactccgcaatcgcaacatacataggaaattgtcagtcgccatttcttcttgtagtaagcgttgttctttaaacagtttggacagtaaagaagtcctttgtgtttgcgttttctgtgaacaattccaagaggtaatattcctgaagtaaatccattaggattgtgattttcaaataaataaccctgatagctagttaaaaataaactttcaattgtattataagttaggggtgtactatcaaatataatcttccgtaagtaatccgtaggcatgttgtcaacatctcgtgtccaaaattgttgacttgggaaataatattttgcaaaggaatgactctttaccgcatgagcctgtgtcaatcttaaataccagctactgaaaagttcatcaaggttcggaggtatgtataatgcccaaatgtttttttgaagagaatctataaaaggcattacaaaatatttctacgcaatattttttttcgatcttcgggcgaaacataatcaatattgtccaaaatcttaaggtctattttgttaagaccacttttaagagctaactctccagctttaattaagatagtgttaatctcgccaatgagaccatctgacattgctaaaatttttgaggcaatagagttttctgtaagataggaagggttttcaagtggtaataaagcttcatagttaaccaaaagttgaagtaatgattggttgtttttccatctttccagaatcattgtctcaaatctgttagcgagctgataatcagattgtaagacattgaacgcatctctaatacctacgcaaactattgaaatcattagtttgttacttaattgttttaaaacatttaaaaagactctttgcttaagaggacttcctgcaagcacatggtgtatctcatctatgataatgagtttaatctgaagctttttaaatagggaaataatacgacgtaatttgaaatctggattttcactcttgattattggagcgttcagcaattccaaaattgtgttataaaagctcctaacatctggttccgccggtgcctctacgacgatcaccggagcaacaacgatatcatattctccttcacgcacgtaaggattgttttttttgtaaaatttgttaataagtgccgtttttccattattagtttctcctactataagtagattaggcattctgccaacagtagggtaatcttttaaatcctcaagctttgccataatcttttctgcctgcggataaggaatccatttttgctttcttaaataagagattttctcttctaaggtgctattaagtaccagttcttttgttttagctgtcaaatgcttcatcatctaagttttcaaatggttttaaattttgctcagttatattgatgtcatcttcgcttggatttttattagctgcaacagctttattcaattcaagatctttgtttagtttggatatactttcaacgagaaattccttattggtaaattctttattaataattcttcgggaattttttgacaacttcttggtggatttaattgcttttaattctatttcttctaattttttatacgtttcaaatatgtgatcctgattgattggtcctttgttgtcttctttccattttttaactgctgctctatattcccatacagacattgggggatgccttgcgtccctgtaaggtatttcaaaatattcatttgtatcagggtcaaaaaaatatattacgctaatatctttcggatttcttctaaatgaatatttcttttgactttgctttttattttctacatttatgtattttcgaagtacttcatcgtagtaatgtatgtgatcaatcactacgccggttgcctggattgtcctttctgtgtatggcatgaagtctaatctgacttttcgttcattatgaaatcttgggggcaatccaattcccttaatgtcattattaccaaatatcccatcaatgtatttttcttcaggggtcattccaatacctgaatgaattgatttatggtatatattaacaatgtaggttaccatccacttttcaaattcagctaatgtaaatgatgcttttttttctgatttgtaagaagacctttcattaatatttgaaaatgtagtgcctgaaagatcatgaactgctttggaaaacgaaccaaggaatctttcaatatgtccaccataatgtggtgttgcaacagggcgaaattcaatattcattccgtaattttcacatgctctttttaacatattgcctctgaattcctttgcgttgtcaacatggattgtttccataactccccaacagggccatgatccatcaatattcagtttattaagataattttctttacctaaaatagcattagaaacacactgtcctgtacccattgcaccgggaggatcaaatgatatattaatgcctaaaatcatcctgctgtaaacatcaatggcaaccgtaagatatggtctgttaaatggttgacgaaaaacttcatctactaatataatgtcaactggagtatgatctatttgaacaacggataaaggatgatttgcgtgtggaaagcttcctcttatgggtttaaaattattgtcagagatcttttttccatatcgttgcttgattttttcttcttctgaaatttcatttattctccttctgattgtcgttgagtgtggcattgtaattccggctgttttacattcaaacccaattgctcgtatcagaaagtttatagatttccgtgatgatgtaaggtaaatttctttaatgcatttttgaataatttgctccagctcttcaggcaatctcgattttcctctacccccatttttctttttgcctaaaatagatatgatgcttccagtattttcatatctattgatccatctataaattgttgctttatcaaccttagcttcttcggcagccttctctatatattttaaatccccacggttttcaatcgcaggtcttataattcgaaatctgttttgtgctatttcccattctttctcagaaatttcaagtagatccctattgataatttctttgtcagattcagctggagaaacttctcctatatttacagtatgtataataccacttgcattttcctcaatacttatcctgcgtacatcgacattgcgaataatcgtacataaaatatcattgtaaatgatttgctgacctacattcaaataaaaaatttcctgtttcattttggatagtagttttcatatagttcgtcaagccaaatggaagagtccattgtcaatggatattcccaaaggcatctaattatattttttgataccatataccacatatagtatataagctccatttgtttgtacttgtctcttgcgctcacttgaattagttctcttggggtagtagaaactaattcacacatgttttttaacagtagctgaatatctgggtgattatgatcaaagctattttttttatatctataaaggaacttgcaattttctaaatattcagttctgatatccttctctgtgagtactttaaaatcatatccatttaacgcacaaaattcttcagcagcaataaacttaggcttgtactcaagttcctttttctgtaaatcatcatcatatttaatttcaaccaatacaggctttgcacctttcgaagagaatcgaggatgccagtaaaatagaaaatctggtgtgtatgaacgttgtttgttttcggcatcagaataatagatagttacgggttgctcataatacgattctataatccagtccatttcgagcagatatataaaatccctttctaatgaggactcaaactgaacttctttattatttttagcactaaaaaaacttccggaaagtgagctgtgctttaatccaatttttctcaccttattttgtatgaattgtttcatctaaggtaagaaattaaatttgttcgcacttacttcgtatataaatttgcaaagtaagtgcgaatgtgagcgatttagccataacattttgcatttactctgcaaatatacacggcggcggttatccgcaaccgggggaaatttcactggctcataacggtgttttatttctggatgaaatgccggaatttaaaagaaccgttcttgaagtgatgagacagcctttggaagaccgcgaagtcaccatttcacgagcccgatttacggtaaattatcctgccagttttatgctcgttgcttcgatgaatccgagtccaagcggattttttcccgacgacccgaacaatacttcctcaacctacgaaatgcagcgatacatgaataagctttccggaccgcttctggacagaattgatattcatattgaggttcagaaagtggaatttgaacagttggcggaacgcagaaaaggtgaaaaaagtgaagacatccgaaagcgggttcttattgcccgcgaaacacagagagaacgttataaagatttaaaaatcagctacaatgctcaaataggaccgaaagaaattgaaaagttctgcgaactggatgccgcatctttcaacctcatcaaaatggctatggaaaagcttaatctttccgcgcgagcttacgacaggattttaaaagtatcccgcaccattgccgaccttgaggaatctgagaatattctgtcccatcatgtttcggaagccatccaatacagaagtttagaccgtgaattctggaatgcctgatcatacaatatttcttcattttaattataattttttgtggtttcgtggcagcaaagctgccccgaaacttttattgaaatattttttaatacgacaagttttgtcgttataaacattcatgtttgcaaaaagatcaaaataaaactcaaaatagtaatgaaaactgctgtagaaatttccgaaacagactccaaagaaaatcatttcaaatccatcgttcttctttcaaaagattttgcgccgcatgaaagttcggtagaagaaatagacactgccattctcggaaatgatttcgggattttaattattaaaaacaatcaggatcagacggctgagttttcatggcagaaaaatatcgtttcttccaatacggaaagtggctattttaaagagataatgaatgatctgggcgtaactgttcatcataatgaagattctattacggtgattaatggcggagtgagacagtttctgactatccattttatggtttaattaaaaaagacaacctaaataaagaagtccgcatcaaaataatgagcggactttttcatctatgataagacctgttaaatggataacggaacgttttaaattcctttttttccttcaagaatcatctgaatcattttcagctttctgttttctcgtgtttctggcttttttgcttcttcaatccagcggatatactcctttctgtgggtatagctcattttgtcgaacaatactttcgcttcaggattttcattaaagactaacgcaacatcttctgcaatttccactactttttcttctttgtcttcaagcagataaacagaaacctcatcaccgaaagttttaccaagtttgtttcttatttcctgagttaagcctaaaatgtgacagtcggatttcattttagcgaggcttccgcgatattccaccttatcgtcaaaaacagcttttatttttacctgatcttttttaccaaatatctcttccgtggaaaaaggaaattctacaaaagccgcattcatttcgccgttttgcttaataactgctttaaattgtacagaatctgttttcatacatttacatttagcacaataaccaccacagattaaaattatccagttttccgtctttaaaatagaaaataaaggaatcttctatctcctttcctaccggaatgctgaaacgctgaatattcttctgatcggtattttcgattttcagtttgggaaatagcttttggaaatcttcaacagtggtttcctgtgtaagaataatatgatgcgacttgatctcaaaacggttatttccggatttcgcactgctgaaaataaccttatgattatttgaaataaattcagcattgttggtataggaagtggttattttaccatcaaagtttacaagatcttttccgtatgttttttccatccacgttttatcaagccattcaaaagggcttccgcagtcccatggttccgttttaacagaatcattttttggatggagtttttggaattgttcctgaggtaaaacaatatcatttccattcacctgaacgttttcaattttcaggaaatcatctgtaaatactttaggcaattctttttctgattgtttttctttaggtaaactgtcttgtttgataatcgtttgtaaagaatctttttcctgtaaagattttaaattttccttctcttttttctgacagctccataatgctaaaaacatcagtaaccctgttaagattttatctttcatcatttaataatattttttgatcgggttaaaatagtaaaatttaagcataaaaaaaccgcgaaagtttactttcgcggcttcagtatctgttaaaagattattttttctttccttttgcaggagttgcttttggcatttttgttttggtgtctgcaggagtgttctcgtcttttaccaattgtaattcgtcgataagtcttcttgcacctgcgtatttatcgatcgtccaaagaacgaaacgaacgtctacattaatggttttctgccattcctgttcgaaaacgatatctccgcttaatgcttcactgtttccgtcgaatgcaataccaattaagtttccgtctgcatcgattaccggagaaccggagtttcctccagtaatatcattgttggaaaggaagtttaccggcatatatccttttgcatctgcatactgtccgaaatctttcaggttataaagatcgatcactctctgtggaagatcaaactcttcgtcccctttcttgtatttccctacaagacctgtcatatcagtataatagttatcggtaatcccgaagtagtttctgtctgatcggattggcagtttatctaccgttccgtacgttaatctcatggtagagtttgcatccggatagaattttttctcaggcattgccttcattaatcctgctaagaataatctgttgtttttagcaaaattatcatcaatttttacgaatctttctgcagaagctttttggtctgccataattccgtttgcaattttccaaagcggatctgcatccagtttcaacggatccggattcagcataaagtttgttgcagaagttttgttggcgaagattgaagaatacgctacattcgaaagatttttagcatccagtcccataatggtttcagaagctacatctttgtttactcttgtctggtaaaggtttaccatagagttcatcatttctccttcaagcttgatattgatgttttcataagcagatttcaatgctgcctctactttcggcttcattgccagtcttcctgccatatcctgttttgcatatgcctgaagaacgcttcctacctgtaatgcaagtgtgaaatatttagaatttctggaaagctgcgtcatgtacattctctccacatttctgtctgaagtctgcttgtaataaagtccgatatcttctaaaaccgtttcgtactcaaccacattttcaggttgtactgcccaggttttaaatctttcttcaatcttttgcttgtctgtaatggttccgtttttaataacagcatcaatagtaccctgtctgtttttccagtagtttgcaactgaagcgtactgagaagcgtagttcaactgagtccctttgtctttatccatgtacttcttcattacatccatcgctaatttagaagcttcaacccaagccggatagtctttgtttaccatctgctgaattccgtaagaagtcaggtaacggttggttcttcccggatatcctaagatcattgagaaatctccgggctttactcctttcagagaaaccggtaagaaatgtttcggttttaaaggaacgttgcttggagaaaattctgctggatttcctgctgcatcagcatatactctgaaaaccgtaaagtctgcggtgtgtcttggccattcccagttgtctgtatcgcccccgaattttcctaatgcggaaggcggagctcctaccaatctgatatctttgtagtcttgataaacgaaataatagaattcgttcccgttgaagaagtctcttacaactactgtgtattttccgttctcagagttttcagactggatcgcttttgtttcagcgtcgatcacagcttttctctctgcagcggacatattgttgtttaatttagcgttgattctttgggtagcatcatccattcttaccaaaaatcttacgtaaagatcttttgcattgaattcatccttctgcttcattgcccagaatccgttcttcagataatctttttccggtgtagaagcggcagctacagcaccatatccacagtggtgattggtaaaaataagaccctgattggaaacaatttctcctgtacagaatcctccaaagcttacgattgcatcttttaagcttgaattattgacagaataaatctcttccggtgtaagatgcaatccttctttttgcatatctaccccattcagtcttttcacgagcattaacagccacattccttcatctgccctcatctggacaaaacttaaaaggaaagtgaatagtagtaatattcttttcattttataaaataatttttgtgtcgctaatttactaatttttttactgtctgatgtctgagatggtacgaaaatggattccggtgacttatgaaaaagatattcgctgcaattttaacatttttatgcctgagttttgtcttaaactgctcttccgtacctgtaaaaaatccacagatccagagagaatggatgctggtttcttttaaagattattctaaagaggaattaataaagaacaatgcaaaaattgatcttacctctcctatcgaaaacagaaaaataaaaacttcagcctttatgggatgcaataaactgttttttacatctgaatttaaaaaagagaatcaattaaaaatttcagaagttaattcaacagaaatggcgtgtccgaatataaaactggaaaatgatttttctctgaatatcaaaacaatgaatctttacaaagtggaaggacattttctgactttaaaaaatgatcagggaaacactatgaaatttattgcagcagactgggattgattggaatcttattgaaataattttaaaattaaagctaatattttgaaatttagctttttaaagaaacacaatttatacatagatattatcaggcttatacatctccctcttttacctaccccaaaaaattcgttttggattttttcctgaaaaatggtatcttgtaaatctcacaaatacagatagaatttaatgctagaaaagaaagaacataattacgaaaaggcagttttggtaggggttgttacacaacatcaggatgaggataaacttcaggaatatatggatgagctggagtttttagcctttacagccggagcaacggtagataagcgttttacacaaaagcttacgcagccagactctaaaacattcatcggaagcggtaaagctcaggaaattaaagaatacgtaaaagaaaacaacataggaaccgtcatttttgacgacgaattatctccttcacagcttaaaaacctggaaagagaaatggaagtcaaaatcttagaccgaaccaaccttatccttgatatttttgcacagagagcaacaacctcttacgcaagaactcaggtggagttagctcaataccaatatcttttaccccgattaacgagaatgtggacccaccttgaacgccagaaagggggaattggaatgagaggtcccggtgaaacggaaattgaaaccgacagacgtattatccgcgacagaatttcattgttaaaagataagctgaaaaccatcgacaaacagatggcaacccagagaaacaaccgtggaaaagtagttcgtgccgctttggtaggatacaccaacgtcggaaaatctactttgatgaatgcattgtccaaatctgaagttttcgctgaaaataaactgtttgcgacattggatacgacagtaagaaaagtagtgatcgggaatttacctttccttttaacggacacggttggatttatccgaaaattacctacccaattggttgaatcgtttaaatctacgttggatgaggttcgggaagccgatttgctgattcacgtagtagatatttctcatgaaagcttcgaagatcatattgattctgtgaatcagattttaatggagatcaatgcccatcagaaaccgatgattatggttttcaataagattgatgattttagctatgagaaaaaagatgaagatgatttaacaccatctacgaaaaagaatatttctctggaagaatggaaaaaaacatggatggcaaaatccaaatatccgacggttttcatctctgccattacgaaagaaaatttccctgaaatgaaaaagctgatctatgatgaagtaatgaaaatccatatttccagattcccgtacaacgatttccttttcgaatatttcgataatgatgaggaagaaagtgcagaaaaagatcatgaagagcaataattcatgaacaggctgttttccaacaacacattctattacttttttctgatcgtggtaggaattaattttttgggaagcatcggaggaatcagcaaagaaacagatattctgatattaaagattttaggaatgataacagtcgcagtttgcctgttggcactgttatcattctttacagatcttaaatttaatcatcttttctttaaaatttatctctacggtaaaggtttgctttctcctttttgtttattgatttattttctttacgaaaaaataaccaatgacctatatgtttccggaacctattttatgcccgctttgttccggctggttttaggatttgtcatgctcgttttatacaacaaatacaaaatagaaaagaaccgatgaaacattacttttttctcctgtttcttctgatttcgcttaatggttttgcacagaaatcaaaaattgatttcaaagcgattgaaaaagaccttaaaagtgagaaatcccaatacaactacaacaagctgatttttaaatacaaagcctatccaaaatctttagacacgcttgaaacgcagcatctttactatggaaggaacttcagagaagatctgctttttacaacggatgaagcgtttaaaagcttagcggatgcttacaaaaataataattttgaggactgcattaaacagggaaaagtgttgtatgataaagatcctaccaatctggatattctgctgattcttctcaaagcctatgacagcattaaagacggagaaaattttctgtatcatctcagtcagtttcgtgcattaaccgacggcatgaagtcttccggagacggaaaaacagaaaaaacaccgtatctcgtgaattcagtaggcgacgaatatattctgctgaacattctgaatcttggaaaggaatatacaagaggatcaaaatccgcaaaagacggaattcttgatatctgggaaaaagacggcaataaaatctacatcaaagtattatatatcgattattaatcacaaaaaatttaaacaccaaattagtggaattatactattcattttcagccttaattgttttagcatccatattttcataccttaattacagatttctgaagcttccgagtaccatcggaattatggtgatcgccattgtggtttccatatttttagtttccttcggagaaacggttttgccgagaactttcgggcatcttcacaatttaatgacgggaatcgactttacagaagttctgatgggtgccatgctaaatttccttctgtttgcgggaggaattcatattaatatcgacgatctcaaagagcagtttgttcctgtcgtgattttttcaacggcaggagtcgtgatttctacctttgtggtgggtttcggcatgtattatctgttacctcttgtcgggatctcgctgccatttatctactgtctgctttttggcgctctgatctctcctaccgatccggttgctgttctcagtatcttaaaacaggcaaatgtttcaaaatctctggaaaccaaagttgccggagaatcgctttttaatgacggaatggcggttgtggttttcacagttgttcttcagcttgcgataggaaacaaagtaacactgaatatggaaagcatcggtctgttattgctgaaagaagcaggcggcggacttttactcggcgttgttctggggtggattacttcccgactgatgcgtgaagtggacgattatattatttccgtactggtgacgctttctgtagtcatgggaggttatcttattgcaagacagatgcatatttcgggacctttaaccatggttgccgccggattgtttatggggaattttaatgtaagattcaaaatgaaatctgtgacacaggattatctgatcaaattctgggaacttatcgacgaaattctgaacgcagttctattcctttttatcggctttgaattattgatgatcaaagacttaagccattatatgattccgggattattggcaattgcggtggttttactggcaaggtttatttcaatttggggacccactaaattcatgtctttcagaacaagattcagtccgcaaacggtaaaagttttggtttggggaggaatccgcggcggagtttcgattgctctggctctttctattccgaaaaatgaaaacagcacgattgttttaagtattacttattgtgtggttgtattttcgattattgttcagggacttacgattgccaaagttgccaatccaaagaagattgcaaaagaagaagaggaacaggaaggtgttgctttacataatgttgactaaaccattaattatcaaatgattgaaattttaaaagaaataaaagaagctttaaatgagctttcaattccggaaaaagcagattcttctgctaaatttttcaaaaacggaaaaggagaatatggagaaggcgatttgtttttaggggtaaaagttccggatcaacgctctgttgcaaaagaattttacgccagaatttcgatggaagaactcagcaaattactgtcttcccaatatcatgaacacagattgacggctttattcatgttaatttctaaatttgaaaaaacaaaagataaagcggtaaaagatgaaattgttgagttttatctgaatcatttacagcacattaacaactgggatctggtagattcaagctgttataaaattctgggacgctatgcttttgaaaatcagaaagatgaattactgagaacgctttcggattctgaagaaatgtggcataaaagaattgctgttgtgggaacgatgcattatgtaaaaaagggatcatttgatcttaccaaagaattcgttaccaaaaatctgaaacacactcatgatctgatgcacaaagccaacggctggctgcttcgcgaaatgggagaaaaaaacgaagcagaattaattaatttcctgaataaacattacaaagaaatgcccagaaccagccttcggtatgctattgaaaaactggatgagaatctgaggcaggattatctgaaaggcagaatttaaacatctggtctgtctaaaattttacttaaatttgaaaattatttaaaaactcaaatatgaaaaacattatgaaacagttgctcttactattgccactgttgcttcttacaagctgttttgatattttagacaaaatcaacgtaaaagcagacggcagcggagaatattcgcttattctgaacgccagtaaaagcaagacacgattggcttccatctcgaaaatggaaacaattaacggtaaaaaagttccgaaaaggtctgaaattgaagctaaaattaatgaagcggcaagaattttcaaagcgactcccggaatttcgaatgtgaagacttcaatggattttgataactacattatcaaattaagctgtaatttcaaaaaaatcgaaaacatcaatgccggactccaacaactgaaagcaaaaaacatcgtaggaaaaatggttccggtacagctttacagtcagagtccggagaaaaaaacattcaccagaaataaagtgagcagttttaaaaatgattacgacaggatgagcaaagcggataaggaaatctttaacgatgcgaaatatacttccgtaatgcagtttgaaaataccataaaaactcagaccaacaatgcttacctgctttctccgaacaaaaaagcagtaaaactggaagccaacgttctggattttatccttcagaaaaaacaattacaaaataccattctctttcaataatttcaatcaataatcatgaaatctattttacaaaaaacacaaattttatttctactttttgctttcggttccatcttttcacaacagaaaatgaagcttccgaaagacgttcttttttacatggaaattaacgggaagcagcttaaccagaaaatcaactggcagaaactgaatccttttctgcttgaagtagctaaagaagacaaagaaaaacaggcatcgtggaacgattattccaaaaccggaataaagtatgatgccacacaatatcattatgccgtttttaatgattctgtaaagacatataccgctcattttctgctggataacaaagaaaagtttcaggaattcattaattcatccaagaaaaaaggactggaaatttcgaaacgaaaaaattactcgtacgttaatcttgatgatgaaatgttcgttgcatggaatgataagcaggcggttttgaagctcatcggttatgacaaaccctctgctgaatggaatgatgaaatgacagcagacagtgctgctgtaacaattgacagtgcagcagcggctgttatggacagtgcagccgttgcggttgacagcgcatacgcagaaaaagcattcgattacaaagaagagattaaatatctgaaagatgatattcaatatctaaaggaagacattaaacaatatcaggcagaaattgccaaaaaacaaaaagacattaaatatctggaaaaacatcacaaatatccggaagaagaaaaagattcgagcgacaaaaattattctgaaaaggaaagcgaatacacgcttccgcatatggaggaagaaatggatgaggagacggaagaagacagcatttaccagaaacagatggattctctgaagatcgaaaaattcaaaatcaccaagaaactggcggaaaaggattttgatgattatttcagttctgcaccggagcttgatgtttccaaagaaatattgtctttccgtgatgcggcttccgatgtttttgtgtatacggattacggaagaatcgtaaataacggagcttacggtaaaattatgaaccactaccctttcggaaatcttatggggaaagcatacaattcgaattcttcttacaatctgtattttgacaatgataaggtaagactggtaaacagttatcagcacaaaaatgaagtggttcagaagagcatcaattctgtttacagagggagaaagaataaaaaactgacggctctcatcaacgataaaagcatcggatattatgccattaatgttgacgggaataagtattttgatctgatgtacagcctgttgaaagattccggagaaggcgattatcagaaagaaatggaacttgtgatggaaaccatgaaaattgttctggatgaaaaggccattaccaagatcgcacccggaaacggaattttcgttcttaatgaactgaaatccaaaaccgtagaatacaccgattatgaatacgatgatgattataatgaaaaggaagtgaagaaaaccaaagaaatcgctgttccgaatttcacgtttgcttttgctacggaaaatgaagggtactggaaccgtattttcgatatgatgaccacaaataaagtgacggctaaaaaattctctaaaaacggagatttctatgcgttcagtgaaggaaaaaatgacggatatttcgacaagttattctttacggtaaaagacggaattgtctacataacgacctcaacagagaatatttcatctaaaaacaagtcggaaatctctgaaaaatgggcaaaagattcggcaaaatatcctttgtcgggaaggtttgacattcagaaactgatgatcggacttgagaaagaatttaaaactccgtcggaaagaaaaacgctggatcttctgaagaaaaatatgggcgaattgtattttaaaacagaagccaaaggagaaaaaatagaaacagaagttaattacaatattaaaaatgcttcggaaaatagcttaatgtatttctttgatgtaattgatgaggtgtataaaatgaaggaatctgataaaaagcaggttattttataatgaaaaagaaactttttgccttcgttcttttgctttttgcggggatgatgtatttcgttttttaccataaacaaaatacgaagattttttctccgcaggaagccgatgccattattctgatcgatacaaaaaagctgacaagagaatatgtttatagtctcgcaggacatccttctttatggtttgaaagcaaaggaaaaaacaaaatatcttttagaaaatcgggagtgaaaattcccgattttttacaggtttttcatctgaaaagttcaaaggtttcgaactggtacagtgtttttgaactggaagacaggaagacttttttgttgtttctgaaacagcagaagtttacggatctgggaaatcaggtgttccgaaaagatgtggtttttattaaaattttgggagaaaatcttattataggaagttccagtgatgattttgagcgaattaacaaccagctatttcacagttctcaggcaaatctttttgatgcagattcgctcgttaccaatggattaggaagtattattctgaacacaaaaaaaggcagccacaatctttctgtcgaattaagacacgatgaaattgaaatcagaaatcagtctgattcttacgatccctctcctgttatttcaaaactattggagaccgattcttttttagaaacaaaactggatgctgaaaatattaaaaacttctcctctatttttgataaaacgtttgcagattcttcatccgttaatgagataaaagcttctgtacatctggaagaggtgaatgacacaatgattacctacagctacgatgataattttaatgaagttgaaaagaaaacatttcagaagatcattcaaccgaattatatcattgattttcaaagcttaaacccagaaaagacggaactgtattttgagaataaaaaatggatcaatgcacagaatcagttcacggcaattccttttcagcctaacctcatcactcagaatagcaaaggttttgaaataaaatctacaagaaaaacagttcagcagtctttcaacctgaatgaaaattatatttttgtaaaaaataatccgttattgctgtcttttttaaaaacattatcacctaaggaaaagaaggttatttcagatattgattatattttttatggaaacagagatcaggattattatctgaaagtacagtttaaaaaagatgaccgtcctttgattttaaggtggtaaaaaatttaaaattcaatggatgcttcgcatattgccttactgaaaacgtttacacattacttccttcatttcgtttttccggtgtttattgctttactgttttacagggaaaactggaagaaagtgtaccttattcttttggcaacgatgctggtagatctggatcatctttttgcagaccctatttttgatcctaaccgcggaagcatcggttttcattttttacattcctattacgccattgcagtatattttatcatgcttttttttaaaggaaatacaaggattgtagcaatcggacttctttttcatatgtttaccgattttcaggatttttatttctggaatcattaaaatatcattaatattttcttttgatatttcaaaagtcatcgattttttgtattttagaaacagttatgaaattgaaagaatttttacattatacatatatttttcccattcttgcagtcggttattatttttccggactgatgggaacgggtgttctgtctgatgtaattgccggaattttattaacaggcagtgttttatccgcagtgcatcacgcggaagtggtcgcacataaagtaggcgaacctttcggaactattatccttgcgctgtgtattacaatcattgaagtggcgctgattatttcgctgatggttgcgggaggagatcaggcgattacgcttgcaagagatacggtttttgctgcggtgatgcttattcttaatggaattttaggaatctgtattttggtgggcggtgtgaaatattacgaacagtttttcgcaagaacttccgccacaacttatctggttagtattgtttccatcctgattttgactttggtccttccgaatttcacgtccagcgtaaacggacctttttataatgaagcacagttgatttttgtttctattgcctgccttgtaatttatggcgtttttctgatggttcagacgatccgtcacagaaattatttcatcgttccggaagagcagtcggaagaaaattatattccttcggtttcaaaaacggcaatcagttttacttttctggtgatttgtctggcgattgttgtgatgatggcaaaaggactttctgccacaattgaaaatatggtgcagagtttgggcgctccaaaatctctggtcggagtcattatcgcggcggttgttctgcttccggaaggtgttgcggcgattcgggcggctcgaagcaaccagattcaatcgagtttaaatcttgctctgggttctgctttagcaagtatcggacttaccattcctgcggtttctgtggtttgtatcctgtatgatattccgctggttttaggtctggataagaaagatattattctgctgtcgctttctgtttttatcgtgatgctttctttaagccgcggaaaaacgaatattctctacggaacggttttattggtaaaccttgcagcctacattttcacggtaattgtgccttaatctgaaacattaaacgcagaacattaaaccattaaagtcttctcgccaaatccattttgaaagccattaatttggcaatgttttcggatttataaattgccagatctgcattttcgcccacaaaattttcttcaaccgttgttttccagagattcagccaacgatcgaaatgatgctgttccatcgcctgaatttcattgatcggaaaatgaacacccatcggatttcctttgtacgacatctgcccgaaaagaatggattcccaaaacgaatacatcttgggcaaatgactgtcccattttactttagcaatatcattaaagaaaaagccaatgacctcatccttaacaactttagtataaaatgaattcaccagatgttcaatatcttctcttgattctaattttttcatacaccaaagttagcataaaattgtgtgggaatgttttgtggttgggttgatacatttcaggtgtgggaatttttcttttacgagaacagtatacaattttctgtaagtcagattatggagttactatctttgaggacacaatagctaagctccgatgctctatctttaagaaatgaaaaacagaaggaagaattacagtttagagtttaaacttaaagctttggaattattagaagagagaggttgtagtatgacttctttagggcgagaacttggagtcaatccagacaatatcaaacgttggagcaaggagtttaaatcaggaaaattaacagcaggctctactataaaggaaaagagtaaggaagagctggaaattatccgtttgaacaaagtaaaattagaacatgaaatcttaaaaaaggaggtaagcatcttttccaggagcggcaggtaaaatatcgttttatagaatctcatacgaatatatttcctgttgaaaagatgtgtaaagtactaagagtgagcagaagttcatattataaatggcttgttgggattccatcaaaaagagcattgtataatcaaatgctgagtgatgaaatcaaaaaaatatatgttctttataaaggtcggtatggcagtcccagaatagctaaagaactggaatcattgggaataaaagcgtctcaacagcgagtagcaagactgatgcagaagcattcattacgaagtatattgaaaaggaaatttaaggtgactaccgattcatctcataaatatcctgttgtggaaaatcatttgaacaggaatttttcggtgcagaaacccaattctgcatgggtatcggatatcacttacataagaacccaacaaggctggctgtatcttactactgtaatagatttatttgatagaaaagtaattggatggtctctgagttctaccatgtatgctaaagacacaagcatggcggcttttaaaatggctctttccaatcgtccattaatgaaaacggattcactcattttccattctgacagaggggttcaatatgcctgtaaggagtttgtatcgatggtcggaaaaaacagacaaattattagaagtatgagcaggaaagggaattgctgggataatgcagtggctgaaagtttctttaaaacgctgaaaatggaacttatttatcagaatagatatgaaaccagaaaacaggctgaactctcaatatttgaatacatagaaggattctataatactcacagaagacataagtatctgaaaaataaaacgatattagaatttaatcaacttattattaacaaatttaaaatcgcagcatagggctaaggaaatttgtccacttttttgtaggaagttcatgttgccttttctcttccaaaaaaccgcaacgataaagttgcggctatatttctatttacgaaaaaaattatgaaatattagattacttataatcaaacctatcttcatcaggataccaataattagttaggcatagacccatagtaccattttcatagttttttagttgatcttctaactgccctgatgtgccaaattgaacaactctaccgccaagtttgttttctactaaaaagggagcattgcccactaatgacttattaaaatttccagttaaaatatattctttagaatcataataataaatattaccataaggttttttaataatactatctgtttctactataacttcaatatcctctccaccaaaatgttctcctttactttttaaataacgttctgctattactaacatttcttgatctgttaacataaaattaattttaaattgttattatcttacttttaaatatctaaatcctcctccttcagatgatttaaatctttcagcatacttacttttgataaattttgtaaattccggtgtcctgccaacttttacatattctccactttgtccatcaaataaatgcaatactccatcctttttcactcctacaaaataatgacctttagtttgctgtgcaaccgctcccattgttccccttacattttttacatcagacgctccataaataactactatttcatcatttttcatcaatgcctgcaatctctccaatggagtttgaaaaacgccatttatagtttctgggtgtaattgttgaaagctacctcccccatacttggcggcaactttttcaaaggtttcgtatccagatggatttgcccttcgtattgttttgtttttcaaaaaatttatgatggcatctaccacatcagcacaattttcttttcctatctgcattacagcattttctcctactgatatatggttaaacaatgctaatacctcttttaaattttcaaatggtttcgcaatggttttctctaaaaatttatcttcgagctccttaaaagattttgccttttcagcctctgttgttgctactattgattcgccgtattcacctccttcatgcctaaatttctccagaagttcttctttctcagcatttgtaagctttctggtagtaccattctcttctatgactgctccatcaagctgtttctctaagcttaatagatttttatctccctcaaatttagatatttcgccgatgtcttccaccatttgaagaactttttctttctgccctttaagaagagtatatttcccaaagacaagcttccattctcctgcggttttctctacacgtaaacccattttataggccagaacaattatttcgtttttagcagagaaattagacagccataccgacatttcttcaagtgtttctgttgcccttgctgcttttcctattttaggagaaggtaaaaagagtgaaagaatcatgcttatctcgtaacactgctgataagagagtctgtagacagagcctttactgttttggaagtcatactcagtaagcagatctcccagctcctgaggggtcatcataagaaaatccacaataagtctaaagaactgcttaaaagtagctctttctgaaagaattttatataaactgggaagaagcatcgcaattccgtccgcagtatctacaactgcattccagaaaccacagaattcagcattgagagcgtatgtccagtcaacctgtttttcttttatctggtaatattccaactgttctctagagtacgtgtatttttctataggaacagttgtgtttacgccaatggctttaagtaaagccccgttcaggataggatcaaacccgtttacatccggaaggtaggatttttcagaaaccctgtattctttaatatctttaaactcatcacgaaactggtctataaagaattttaaaggggctcccatttcatcaaaaagatagctgaccactctttgataattatattctgcaaaaatctcttgatcaatggcattcactatcctcgtctttggcaatccataacgattgaaagttcctttactattatacgtttccaaaacactgttggctaaatcttctttaaagatatccaaaacaggatttatcacttcttttcctgtattgtcctctatcacatatcctcctgtagcaattaaattttcattattaagcttcaggcagtcaaaaatatcacttccaagattacatactacatattccacttcctttttgtcaggattagaaaataaatgaaacgtcattagattagcgtcttctccttccagaaaccagtatgcattattagagatactttttagttcttcatatgtataccctgtaaaaaaatctacccaagaattatatgtagtttctatcagttttgttcgtttagttccacacattttatccatgatcattgatatttgatattatttataaccgttaccgctgtaaagccaattttttctaaatctatatctttaaataaatttttcacggtggcatacttttgtttttcttccaagtaacttctaaaagacccttctttagctttgtaaaaaatactttcttttccaaaaggtgattttgcagcatatgcatttgatatttctttaaaagatgtacctgcaattccctgcaaaggatttttattcccttcaaatcctttacttacttcctcaaaagacagtattttgtatccggataaatctccgaattcgtcatcaaactttcccattttcttcgtttttattcattaaacactccagctcatttaaaggaaaaagttctttggttttcatattttggataaatctttcggtttggctttcatctaataccaaaagatccagatgataatcctcttcaaccaaaacatgggcatttttcagtttgcatttcgcctgtaccaaaacatcccaatcttttccttccagttcgttccaacgttccaaaggaagccttcctctgctcccgaaaagtagaatcttttctacggcagtaatctcactaatcttgtcttttagacgcgtgaggatataaggcagcacttgttcgtgctgccaaatagcctctgtttttacccggctcatttctaaaaattttagattttttaaattctaaattttagattataccaagaatttacttaatggtactttatccagatattccgcagaaggaatgagttgaccactcttgtctaaaattctttcacgtccgtatttattaaattccggagatgaaattttaaggtatgattctttgatattaacagagaatttcaataattcatgtccatcatcttctccaggttttctaaaagtaaacagcggaattttagaaatgtttacttttagtgtaattcctgttttaccatacggataagcttcaacaccttctatcattgaaatttcatttgctaaaactccgtaaattttggaaatagaatccgttggtaaccatgaagcgtctctgtcgattgttattacattgcttagacactcataaactcttgggaaggcattaatatcatccaactgcccaatgatagtagagccttcatccaattgatcaaaagttatttccatccatttatcagaatcctgcccaatctggttttggttcatttcaaaatttgtagcacacatttcgcctaaattatcatcaaacttcactcccggttcgcaattgcatggcaatgctttttctactctcaaaccgatagaatctgcctgaagtatagtaagcgatgttggaattctttctctccaaggttctccttctttggttgctttcggagatctcatttcatccacgatggacaagaatagcggatcatcaattaccggaacttctcctccgttccagatctgtcctgtcgcaaggaagtgtcgtaccgcctcttcgaatcccggacgtaccgtcacgataactctcgccataccggactgcataaatgctctgaaaacagagtcattatcatcgaactgataaagttctgcccatgattttctttcgccccagtagtaagggtagaaataatagctcatgatttcccattcgaatgcctgctccatgaattttgcaaatgcggcatactgatccagtttcccgtctactttaatatctgtattcaggaaggtttcatctccagaagaatagccgttgttgtaatatttccctctaccgaaggtaaggtctacattaggattctgctccagcatataagaaatacagtttcttcttaaaatggtattctcaatttttctgtagaacccaggatttgagcctttgatctcaacgcccatcgcttttatttcagctaaagcctgctcgtatttcgccaattcagtttcataggcttcaataattttgttgaaggttttttgcagccaagcattttttgcttcttgggtcggtcggcacttaatatctataacagcatttcctgtatgaaaattggtaacagcaaatgaaacaggaattgtttccttgtaattatcaatagatccaaaactactagtatcatctacccttcccggaacagaagtaaatgatctgtctcctacgcctaccaatatctttctatcccatgcacctccagattccattccattgaagttaatttttgtataataagtttcatacccttcaggaattttaatatctgctgattttgaacaaccttgattctgagtaaccgtatagtgctcaaaagattttccaactgagattattggtgttaatttttcatcaacttctacattaaacttactcaaccaaaactttagcttagattcatcttccagagatgaaaaactctccagtttatgaaccgcagactctctcggatcaacaggtttcaccaattggttttcctgatttttagaaatcgtcattcccagtttatgcagttttgccggctcaggaaccatgaattcaaacatcattctcttaccatagttgtagatctggttcttaactactttatctacccaacgatacacgcctactacatgactgcttcctttcgtattatcaaaaccatgtttattgttttcttcaaactcctcgataatcttatcaatacgctcttcttttactttggtcacaattctgtccaaagctcttgccgttatatctttggcttccgtaaccgcctgtctgttgctttcctctttggaattgtgggtagcgtaattggctccaacatttaaaccatatctattatctcccattccccaactagcattaaatccagcctgcgccgcaaaatctttagattcctgaaggattttagaaatttcgctttgcatttcgtgtctctcggtagaagtggtatcggacagtttttctttttcagattcagtcgattttgttgtttgattttcgcttcttctgagctttcttgtcgctctttctttatattctctcgccatgatgttttcgatgtgtgccacatctccttctacatagcaataagtggattgttctacttttttataatcggtaatcccgatattcttcattccaaatcctgaaggaataaaagttcccttaggattagctgcagttgttccggagctcgttcctgttcctgttcctgttcctgttcctgctcccgttcctgttcccgtattccctctgtcttttgctgtaaatgttccgggtccttcaaacctgtaagagctgttagccgtcacagtaagagtagcttccatcgtataatcaagaccatcattcagcgtaacctcaccttccagttttacaatttcatacttcgatatgatactgttgggaattttgtttagcccgttaaataagacactaacattcggcgcactatacacctcagcggttgatgctgtcgcaatgatttgctggtcatgtccttttaatgtgtaacttccgcttactatacttacagaattattaatatcggttcttatcatcatattgtgttcgctgctcataaagggaagccatgttcttgcaaacatcggaatcaccgaattactggatgaagtactacccacaggaacaaccactcctcccaaattcgcataggtctgctgattaagcacggtattgttgagaactgtctgctgtaaagactggttattctgagtaatcgctgtattaatctcatcataagtagaaattgcggataacgcaacagaaatacttgctgttccaaacactctgcaaagcgcctctttctcttcctttccaagagatctttccaaagcagaagcatcaatctccgaagcaaaactgaaggtgaattccggaagctcgatctcactgtaggagatgttcataatttcatctttgattctgtgaagctccatatccaattcgctgttggcatagaatttctccggatctgcaacactcagttgggtaagataattgattctgttctcaagaatctgttttctgttatctgcggcagccgtttctttctgaagttgcttctgaaggggttttacttcagcctgataattagaaagtgcaattttataagcgtcatcatattctttcttataattatcctgtaatttcttcaacgttgcagacaggttctgattctgctcaagctgcattgttgcttctgtcattttcaaactcttttgatcgtacatcaccgttttggatgtagattgcggatttggtgacggtgcggtagagttcggcgccttgaagagttcttttggcaatacaactttggcctttactacatcctgatagatttcttcagaaaagtcgtatacagaaaggatatgattaagatgcaagaactgcataatcgtttctttggcataaaaatctttctgagttactacctgataaattaaattatcccagataacagaatagtccgtaattacagcaggcatattagttgccaaataatcattatattttttaatcttctcatcaaattcagatttgcttgctgtagccttatttctcgctacccagacagctaattcataaaaagcagcatagctaagtttcagattttcttcagtaagcactgtaaatccggaaatattgcctgggttttcaagaagcttttgtaaagacattgttgaattaactttgctgtcaataaggctgttggtacgcgagttgtgatccctgaatataaatcttctattgatatttttaggatccgaaagttccggatttcttgaagcggcaaatctgaacagagtctgtgaactgttgtttgtatttaaatcggttgtagacattttcttttttttggttttaaaattaaagttgaaacaatcctttttattaggtcatttcgtatattcagccctattttttaaggtggtttccgacttcgctatccaccttcttgcttaatctttcttatcattgatcatcttatttttagacatattataccttatccaacattttgaaaatgtcgaattaaaaggatttaaaaaaaaattgaatgtttgcttgtgttctttttattattgaaacaaagatattgcgcaacagcgacagaacttgacgcaataaaaatattatctcttaattattacatttttttgaagcctgtttcattataaagtaatacttccattgcatcattgatgtataaagttatctgcatttcaggagataatgtataagatttcaaaccttcgacattcagattaacagaaaatctgcataagttgaaaacgactattgtttgccttttgacaagctctctgatattcaaatctgttccgtctttaaaaagtacatgaaccaatttctttttactatttacatcatagctgccgtttccttctagagaaaattcatccggctgaatcttaagaacgtcatcctctaaaatcacctcttccgaggcagacgaattatcaatagaattattccattttgtgatattatccgctgtaaaatcattagatccccaatgtcttatccaatcactccacaatccatccgccttggttctgcttagaatatttcccgtaaatctttcggtctgaatttgcgaagcagaatatatattttctgtttcaaaatgtaaaaaagctcttttcccatcttccggtcctgaataatttccggtttcaagagttccatttcctacagcgtaaaatccggaacgttcaatatcatttgcactttttccactaccaaagaattccatgggctttgcactgaaaagatatgaaattccataattatgtctaataaaaggcattgtcagctctcctccataaaatcctattcctactgcattattttctctttctgctttgtattccggattgaagttccctttatcccaaactctatttcctttcacatatgtaccagaatcatctactaaaagtaagttttgggaggtatcatgataaggtttaacagcaaatcctgtcgaaacaccgaacccatctgtgtcatcagcaaagtgttttacataatgtgcaatatcatgctctccttttaatctaatttctttcccttcattaattgatatattcgtaaagtatttgactatttctttataaaaattaactacattaaaaggattatcattatcatttcccgcccaaaatctaataggttgaccggcttggtttgccataatatcaagcccacctattacattcgtggaaattccgtatccgaaatctgaacctaaattataaaatgtagattctttagaaaccttacctggagccgtcattgctaacccgaaccactcatacgttgtactttttaatcctgcagtaaatgttttatgactatcaatcgtctgagcagtatttagcgtaacaggatttaagttatctgtattccaataatctgtgtaagactgatactcagattgattttgaaaagtattttgatactgtcttagtccaaaaccatttttcttaaaaaccaataagttctgacttcctccagtcgcatctctgtatcccccaaaatgaatataatcggcccaaggataagtattattattattccatgaagtaaatccaaactggagtttagtgggtaaaatatttaccgcttttatacttctattgtcgatatatctcaaatagcttctccaatcaataatttcattttcagtaatctgatttgctgcatgagaagttgaaatataattatttaaatctaaattatttgttgtaaaaacttcgccatcatttatttttaaaactccagacggagtcaatctaagctgcgccgatccatcattattagtaccaatggtaaaattattaccaatcgctcccaagctccagttggtatctgatgtaaatcctattcgtggataatattgtccactaccataatccttatatccgaacaataagttctttccacctggcgtatttgtagaaagaggttttgcattcgggtcaaataaaccgtctggtgtataagagttataaatggtatcaaacctttttttaccagttacattctgagctgtatctaatgttacgtaatccgctggattaagatttgaagttgcattgatttctaaatatacagaaccactccatcgaaactgtttattatcctcagtggtaatatatatttttcctttttctccaaactgtggcaattctgcgtacttgctgaactctaaaacatcatctacataactgggtagctgccccgcaggaactttaccattaactaaatctgcctttttcctccagtccggatgagcaggcggaaaatctctgtgtgtgtgccaatacgactgcatccagtcccaaaagttttgagagagagttgttttctcatttgttgacatttttttattatttttgttttggttttaagattaaagttggaagttctttttattagagcgcttcctgtttagccttattttttaaggtggtgtccggcttggatatccaccttaaattttgttattgattctcatcctttttctttatacaaatatcgtccggcatgacgacaaaactcgtcgtattaaattgatttctaattattttcgataaaaactcatacttaattgaaaatcagtgagaaaaatttttgaaggatttttcggaaattttgaagagaaaattgtcttattttttaacctttttcataaagaaatgaaagaattctacgagctgctttttgccattaaaatcaagctgaaattttcatattttaactaaaagttttcataaaggcttttgcaaatttcatcacaacaatattttatctttgtatgttgatttgaattcaaattgataaataggtagattaacttgtttttcaattttagaatcaacagaaaaagtaaaaacaaaatgatataaaaaatggcaagaggattcagagaaaaaatcagacagaaaaacactgaaaacagtggttttggcagcaatgtttcgggaaggtttatcaacaaagatggtcttccgaacgtcaacagaaaaggggtgaatattttcaacagatacagttggtaccacacgatgttggaactgtccagttttcagttcatttcctatcttgttattgcttatattctggttaatttattttttgctttaatttattatctcattggtgtagaacatttaacaggaattgataaaagcaatcctgtgaatgaatttattgatgtttttttcttcagttcccaaacttttacaacagtaggatacggaagaattgctcctgtaggttttacagccagtcttgtcgctacctttgaagcttttctgggattgcttacctttgccattgcaacgggacttttctacgggaggttctcaagaccgagagcatatctgaaattttctgaaattgccgttatcgcaccgtttaaagaaacttcagctttgatgttcagactggcaccttataaaaataatgcgctaacagacgccgaagttgttattaccacggctattgaagtggtagaaaacggtacaccgagaagtaatttttatcagttgaaaacgcagttcagcaaaatcaatacattggctctgaactggacaattgttcatgaaattgatgaaaaatcccctttttatggattttcagaagaggattttaaaaatacaggaattgaaattattgtgcatatccgtgcttttgatgaggttttttccaatacggtggttcagagaacttcttatataaccaaagaaatcgtgtacggtgcaaaattttccccgatgtattatcctgataaagataatctttccacggtgctgaatctggataaaataagtgattatcaaaaagcagaacttccggtattcatggaagaagaagaataaatggatttagaattttataaaaaacaggctttacaaaagcagaaagagcataaaaaatttctcgacggactgaaaaagaaaccgccaaaaaatctggattatatcgttcaggaaactcatgaagaggtttttgaaaaaatagactgtctgcaatgcgccaactgctgcaaaactacaggaccgctttataccgaaaaggatattgagagaatttccaggcatcttcgcatgaaacctgccgattttgaagcaaaattcctgcgtgtagacgaagataatgataaagttctgcaaaatttaccgtgcttttttttaaatgaagacaatacctgctctatctatgaagtgcgtccgaaagcgtgcagagaatatccccataccgacagaaagaagatctaccagatcaataatttaatgatcaaaaacaccgtgatctgtcccgctgcatacgaatttgtagagcgaattatgaaaaatttaggaaaataatataacgtgaattcggagaaaaacatgaggtgcttaatgtctaaaattaatattttagaattgaacaaatactaaaacacctcatgaaaaacaaagatatgctttttgacgaaaatctattgatagnnnnnnnnnnnnnnnnnnnnnnnnnnnnnnnnnnnnnnnnnnnnnnnnnnnnnnnnnnnnnnnnnnnnnnnnnnnnnnnnnnnnnnnnnnnnnnnnnnnntaacacatgcaagccgagcggtattgtttcttcggaaacgagagagcggcgcacgggtgcggaacacgtgtgcaacctgcctttatctgggggatagcctttcgaaaggaagattaataccccataatattttgaatggcatcatttgaaattgaaaactccggtggatagagatgggcacgcgcaagattagatagttggtagggtaacggcctaccaagtcaatgatctttagggggcctgagagggtgatcccccacactggtactgagacacggaccagactcctacgggaggcagcagtgaggaatattggacaatgggtgagagcctgatccagccatcccgcgtgaaggacgacggccctatgggttgtaaacttcttttgtacagggataaacctttccacgtgtggaaagctgaaggtactgtacgaataagcaccggctaactccgtgccagcagccgcggtaatacggagggtgcaagcgttatccggatttattgggtttaaagggtccgtaggcggatccgtaagtcagtggtgaaatctcatagcttaactatgaaactgccattgatactgcgggtcttgagtaaggtagaagtagctggaataagtagtgtagcggtgaaatgcatagatattacttagaacaccaattgcgaaggcaggttactatgtcttaactgacgctgatggacgaaagcgtggggagcgaacaggattagataccctggtagtccacgccgtaaacgatgctaactcgtttttgggctttcgggttcagagactaagcgaaagtgataagttagccacctggggagtacgaacgcaagtttgaaactcaaaggaattgacgggggcccgcacaagcggtggattatgtggtttaattcgatgatacgcgaggaaccttaccaagacttaaatgggaattgatcggtttagaaatagaccttccttcgggcaattttcaaggtgctgcatggttgtcgtcagctcgtgccgtgaggtgttaggttaagtcctgcaacgagcgcaacccctgtcactagttgccatcattcagttggggactctagtgagactgcctacgcaagtagagaggaaggtggggatgacgtcaaatcatcacggcccttacgtcttgggccacacacgtaatacaatggccggtacagagggcagctacacagcgatgtgatgcaaatctcgaaagccggtctcagttcggattggagtctgcaactcgactctatgaagctggaatcgctagtaatcgcgcatcagccatggcgcggtgaatacgttcccgggccttgtacacaccgcccgtcaagccatggaagtctggggtacctgaagtcggtgaccgtaacaggagctgcctagggtaaaacaggtaactagggctaagtcgtaacaaggtagccgtaccggaaggtgcggctggaacatctcattttagagcgtcattagacgataaacaaaattagtgtagcaatacacaagcacttacttaaagaaaagctttagttttttatttggttgatatatataaaaaatacaaaacccactagaaattagtaaaagggaaagagattgagaaatgaagaaggggaaaagtatattacttattactcatcacccattactcatacaaagtctcgtagctcagctggttagagcgctacactgataatgtagaggtcggcagttcgagcctgcccgagactactaattaaggcggctggcaaatagcttatggcttatggcaaaaaagccaaaggcaattagcaggaagccaacagcacctagagggggaattagctcagctggctagagcgcctgccttgcacgcaggaggtcaagggttcgactcccttattctccaccaattgggtttcaagtttaatattcaaagttccaataacggaagatgagagccattttccatgaaccaagaaccttaaactatgaaccagaaataagatcattgacattaacggtaaagacatcacaaagagaaaaccgagcacttataagtgcttgagtaacctaaaaataggaaagaaatcgttaagggcgtatggcggatgcctaggctttcagaggcgacgaaggacgtggtaagctgcgaaaagctcgggggattggcacacacaaattgatcccgagatgtccgaatggggcaacccaatacattgaagatgtattactctaaatttatttagagagcaaacccggagaactgaaacatctaagtacccggaggaaaagaaatcgaagagattccgtaagtagtggcgagcgaaagcggattagcccaaaagtctttatatgtttaaaagaatgttctggaaagaacagccatagagggtgatagccccgtatttgaaaggcatatttggatgataaatgagtagggcgggacacgtgaaatcctgtctgaatatggggggaccatcctccaaggctaaatactcctgaaagaccgatagtgaacaagtactgtgaaggaaaggtgaaaagcacttcgaatagaagggtgaaatagaacctgaaaccgtacgcctacaagcggtcggagcagattaattctgtgacggcgtgccttttgcataatgagcctacgagttaattttactagcgaggttaaggtattaagtaccggagccggagcgaaagcgagtctgaatagggcgcatagttagtaggattagacgcgaaaccttgtgatctacccatgggcaggttgaagctttggtaacacaaagtggaggaccgaaccggttgacgttgaaaagtcttcggatgacctgtgggtaggggtgaaaggccaatcaaactgggagatagctcgtactctccgaaatgcatttaggtgcagcgtcgtatataagtttattagaggtagagctactgattggatgcgggggtttcaccgcctaccaattcctgacaaactccgaatgctaataaatgttctacggcagtgagggcatgggtgctaaggtccatgtccgagagggaaagaacccagaccaacagctaaggtccccaaatttctgttaagttgaagcaacgcggttggactgcattgacagctaggatgttggcttggaagcagccattcatttaaagagtgcgtaacagctcactagtcgagcggtccggcatggataataatcgggcataaacagaataccgaagctatggatttataattaattatatctggtaggagagcattctatcggcgccgaagcagtatcgtgaggtattgtggagcttatagaaaagaaaatgtaggcataagtaacgataaagggggcgagaaaccccctcaccgaaagactaaggtttcctcagccatgctaatcagctgagggttagtcgggacctaacgcgaacccgaaaggggtagtggatggacaatgggttaatattcccatacttgctcacactaaaaaggggacggttcgatgtagctattgaagacggacggaagtgtcaaggcttagccttcgggcgaagctgttatagtgtaatcggatccaagaaaagccgaagtgaagcaacccgtaccaaaaccgacacaggtggtcgaggagagaatcctaaggtgctcgagtgagtcgtggctaaggaactaggcaaaatagtctcgtaacttcggaagaagagacgccatcagcaatggtggccgcagtgaagaggcccaggcgactgtttatcaaaaacacaggactctgctaaatcgaaagatgctgtatagggtctgacacctgcccggtgctggaaggttaaggaagggcgttagcgtaagcgaagcgtttgactgaagccccagtaaacggcggccgtaactataacggtcctaaggtagcgaaattccttgtcgggtaagttccgacctgcacgaatggtgtaacgatctgggcactgtctcagccacgagctcggtgaaattgtagtatcggtgaagatgccgattacccgcaatgggacgaaaagaccctgtgaacctttactataacttcgtattgactttgagtaagtaatgtgtaggataggtgggaggctttgaagcaggcacgctagtgtttgtggagccgtcgttgaaataccaccctttacttacttggagcctaacttctttcagaaggacattgcgtggtgggtagtttgactggggtggtcgcctccaaaagagtaacggaggctttcaaaggtaccctcagcacgcttggtaaccgtgcgtagagtgtaatggcataagggtgcttgactgtgagacctacaagtcgatcaggtgcgaaagcaggacatagtgatccggtggttccgtatggaagggccatcgctcataggataaaaggtactccggggataacaggctagtctcccccaagagctcacatcgacggggaggttcggcacctcgatgtcggctcgtcacatcctggggctggagaaggtcccaagggttgggctgttcgcccattaaagtggcacgcgagctgggttcagaacgtcgtgagacagttcggtctctatctattgcgggcgttagatgtttgagagggcttgattctagtacgagaggaccgaattgaacaaacctctggtgtatcagttgtaccgccaggtgcaccgctgagtagctatgtttggaagagataagcactgaaagcatataagtgcgaaactcgcctcaagatgagacatcttttaagggtcgtgggagatgaccacgttgataggctacaggtgtaaagttggtaacagcatagccgagtagtactaattacccgtagatttatagcctattcataagtaatgagtaataggtaatgagcaatcatgcttatcataacttagcttaagtatttataagtgcaacactggttttgcctttgtgatgaaatttaccgataaaaannnnnnnnnnnnnnnnnnnnnnnnnnnnnnnnnnnnnnnnnnnnnnnnnnnnnnnnnnnnnnnnnnnnnnnnnnnnnnnnnnnnnnnnnnnnnnnnnnnntgctgctgtattaacatctgctttactcttaaatgcagtgttaatatacaaagaaggagcgtaaaactatacgttttacactccttttttattggttaataaaaatttagtttttcagtgacctcccaaattggcttgggattttttatttgattgaagtacgtttttttgaaagtttaatcaacacttgatctgaatctttaatttcaattaattgctcttctataaataaaaacacatttttatccaaaataaaaatatcaaaaacagtgtatcgctgttttgaaaaaaatttccccgtcaaaataatgcaattattatacttgactggaggagaaagcttaagagtaacttttgatttgtttgtcttagcgtagaagacaataaattttcttttttcgctgtactcaagaacaaaataatgtttgttatttagaacttttagtgaagttaagtaaaataggttttgagcatcaatttcgatctcttttttttgatcatgactataaattacgttattaaatatttaaaaaatcaaataatttagtgataaatattgcttcgacaatacaaagaaaaagttttaaacaaaaaaatccccaagaagatggggataaaaactaataaccatgaaaactcaaattaaacttgagaatcgcggcaaaggtataaaatatcagatgatactttgtctcaggacaatacaatggctctatccaatcaattctaattatcaatggaagctcccactaaatatttaaaagctcactaattatattgattaccttctaaattttctatatcatcttcccagtgaggtctattaaagccacttactgaatcagccaaaagcaaatcattttttagaacaggataatggctttgtttataaaaacaggtagtttcagcccaatcaaaattattactggaagcaagcagctgaatactattacaatgtatcgctcggatatctttttctttataatcaaatccctgtattatttcctccgacttcaaaaatctttttctttctacatatggtccgtccaaattttcatagccgatatgaataattcctggaccatcaagtggtatttgatctactgcttttacaagaagtcgttttacgtcctttgctttcatatttatagaatgttcggagacacttgtccatttaagaatacttatacttcctactttgtcaatgtaaagatttagaatatcaaaatttttatccttacccaatttatatagttcatcgtggttaaatacggtcacataattacccccactttcatattttccaatgcaaacctcaattaattccggtgaattgtttctaatatctctttcttttaattctctatttatagaagccaagttcaacggtctaaatgaaatttcaatttcagaagtttgaatttgtgctcttttatctccactatgaattttaagatattcattaaaacaatcaactaaaatattttcgcctgtctctgaaactggaaccttaaaaataatatcaatggaatacgacaatttatattcttgcaaaatggcagtcaatcgtaaagatctgttttgccattctgacctttcgctttcagaataatccggaactttctgcattcttttacattcaacccaatattgttgtccatcttttctaatctgcaagtccggagatttataataagtgctttcaggtataaaggatactttccatccatttttacaatataaatttgcaactgccagttcaaaaaaaatggtatcagggtgattctttttttcgttcaataattcctcaatctttttctctatcccatcaatctcaagaagtgttgaaagattcttccctatcatcgaaaaaaacggaaatatacgagcggattgtagagcgtcaccagataaaggtctttcaaagatactttctaccagatacatataccatgcaatccagtcatcataaaaagcaattggcatgacgagtttgccatctttactttccgcttttttaaatccatactgaatagcttcaacctcacgaaaatatgatacaactttgtctcgtcttttcaaccatctttcatctcccattctcgacacaaaaaaattcaatgctttttttgcatctatcgcccaaggttcttttatgtaaatattcaccattttaagtaattactattttatatctaatatactttaaatttgaaaatgattgagatcattctgaatgagcatttaaaatatgattaattgagtattttaagttaaaatttcaacgagttccgagttagtaataatccttttgaaaaaaggcaagatactcttttgtaggctcattttatataaatggacgtccaaaaggacatcttgcaccacaaaaaaaacaaattatttttacaatatcatcttcaaaagccattttttaaaagttgaaatcaacatttgcaataatgtgtaaacctacaattgaacaattatataaatatatattgacagtattattgaattatataaacatataattcaacaattcaataaatacatactaccgtatttatacaattatatatttaaattgatgtagaaatatagaatgttataattcaacagaaaaaaattccaaaggagttttgctgacaaaagaaacaagaaattcaaaaaaagcggaaatagaatagcttgaagaatcagatttttcattgatgtaataagtgtgcatcaattcataataaagatcagaatattttagtggaagtagaaaattgatactttccaatattctttcttcttttgtattttcaatcttagttcctctctttttataaaaaacaagatactgctcattaggagcggtaaccttatgatatttttgctgaaaactcttttgaacattcagtaatgtgacacataaataatgtctataggaaaatagggataacaggtcgttatccttgtaataagtaaaactgcaaatcttaaaattgtccactaaagacttatcggtttttaccaataagtttttggttgctttttttgcgcacatagaatgcttatttattagccaacttgccgattcaacgacaacaaattattacaaatgtaaaactaaaaccgaaaaatataaatcatatttttacggctttacaaattatttaaagcacaatagacaattttattttgtcttttttaagtttctgaaccatttcaacagctttctgtcgttggaaaacataatatgccaactcttttgaagggctgaaaaggggtaattttccattataaattcttataaacttggaataatacaatccttcgtcagaggtaaaaatatatattttcctgtgagaagcataattaatccagtccgctaatttatctttcaaaatagccgggtcatttttaagtttaatggtaaatgattcatttccttcaaaagaatcatctttaaaaataagattaaaattactgacatagcagcttaaaacaatattgttttcagttaccattaagggattattgatatctcccagtaaatcaatggtaacatcatttgctttaaagaactgttttattagaaaattccttcttgcaatgtccgtaaataaattgtgatttgtactctcttccatttcattgttatcagaattaaacaaatatactattttttacctattaaaccaatttaaaatattttacctattatttcaaaaatatttttatatttacatattcttattaatcagaattaataatgaaaagaataataaaatttgtggtgtacggagcaatagcgttttacatatttctgtttgcgtttataggtaataccactgacaataataatgcaagaaaaatatctctaactttagttattatcgtcgttggctggaatgtcttgaagaatcctttaaaaagattctttaggaaaatatttaataataattcttgacgataatagaaaaggctgccctatggcagccttattattttatcaaagttgttcaagaaatttctttgcttttttagatgatgcaaatgctttcttgatattttcctcacgcttagatgtatttttgacagaccagcttttaagatatcttacggaattgataaactccttagtaattccaaattggaggcagattagcatactacccatttctgcaataagttcttcaaaagagtaacttgttaaatctgaatgaccttttaattctctttttaatctgctttcgtgaccagtccagtgaatgatctcgtgaaataatgtagaataatatttatcttcagatataaaatatttcttttctggaattgaaattatatctgttaaaggcgtataataagctgtactagaaagagtttgcctaactgttagattaccgttagtaataattgaattgataaattcttcactattacattgttcctgaaaatccagtactagattttcctcttcaatgacagtatcaatatttagatcggctatattttcaatcagttcagcattaaaaacggtataattctttaaacagctgatcttattaatattttctctttcattcaccgacatttctaatacttgttctctgctatagattttacccgtctctctatgtttgtagatgaagctaaaaaattcaatgattgtaccttttgctcctttttttagtctgccaccggctttcgaaatagagttgaatgtcgcataatcggcggtttggaaattattgattaaagcatcaatataaagagctactgtgttaaagccttgatattgcttttttgtaaaaagatttttcggcatttgaaattgcacatcagcataatgttcccagtcctgcggattaactttatcaaggttttcgagtatttttaaaatgaatctatcttcatttttttcttgtgaagaatcttttgaattacttttttttgtgaatgttttcataatactttatttaatattctgacttttctattgttttatgtgcattccaaaagaaatctgtcattcaataaaaccggaatgaaagaatgtaatgaaggctttgaaatctttttgttcgaagaattcaggagtgtctgaaattatagctatgctgtaattatagagacccaaaaagattttttgattggaggatggatttctaatttcgcataagaaaaccgagaaagtcagaatataaaggattagaaaacaattaaaattattcaatccttattgataataatctttgaagatgctgtgattttttcaaatcgacatatttgataaattcaggtgtctttttgaacttctgaagtgctctgataaacttgaaatctgattcaattacacttgagacttttatacaggcagttccaatatctccaaagcagttgcctattccaaataagagagaatagtaagtttctgtagtaagcggtcggtcataatgggctagtatctttttaccttcttcatcttcatttaaaaatctaagttcttcattgaacattgcctgtgtaaagaaaacaccatagtcaacgccattgaaattttcatagttcaaatcaaagttttctttcagaaagttatttacttcctcagctaattgagcttcttttaaatatataattgaataagttcccataaaatttataagtattcttaagtttggaatttgataaaacgattacctatacatcgtgaggttttcatattatttagtgttcgcttggaagtaatagtacattaccctctttccagatggtaaattcttcaaaaaagaagtcagagaatggaataatggctgacattaactgattttcatttccgtcagatgcagaaagactaaactgctcatccttgattcttttaatcgtccatacttgaaaatcttcactttgaaatttttgagaagtctgataagatgctatacagtccagaaaccagtagcactcttcttcatatgccacatttttgactccgtcagtcaataatattccaaagatgtaggaatagtactgctcagttcctgtaaactgattgtaaaaatcattagctgagattttgggatttttcataattgccaattttttgggttaatatttaaattgttgagagcagttgatattttaacagcattgttttataatctactttctccctgtttttcattgcttctgacgaaagaaattcagattcaatacaaaaccgcaatgaagtatgtaatggaggctatgaaatatttttgtccttcggatttaggagtatctgaaaaaaatggcgcagcattttatttagaaacccaaaaagatttttttgtacagaaactgtatttatagttttgcaaaccgaaaacacggaacatttagattatagcaggtttaagagaactattatctatacaacaacagctggatatttactatatttggtagcatatgtggataaaagaaaaacctcagcaattattggattcaggaagtacaacagccaattttttatacaaaaaaggaaaggtttatgtgatggataatcatctatgtgcagcgtggtgctggttacaggaaacagatatcactaaatcatacgacttctatcatattgacagacataatgacctattataccctattccatctatcaaggaagatttattaaatgataatgttgatcttgaaaaaattacatttgaagaatatgttgaacttaatgaaaatcatccggaggaactcaatataaaagctccgttgttccgctgggataattatatattaaatctaaatgaagtatatccgaatttctttggaactacacattttataaccaaagagccatatccggaaaatgaatttatagattgggagtataagatagaagactttcttaacagcttacatcattggctgaaagattccaaaaatggcggtatagtaaatttggatatagatttcttttattctaacagtaaaggctattatcagatttattctgatgaattgatcagaaaagtcgggaatgtattagttgaaaatatggataagatagatgtcattacaattgcattaagccctgaatgctgtggaggttgggaaaatgcctttaaaacaatgaaaattcttgacgaagtactcgatttaggtatggaaatgtaataactcttagttgcaacaactctatatttttttgataacaaaatcaagattaaaagtagtttagaatgacaattgacaactaaaacgattaatttgtatatttggtgaaaacaataactttaataacttaatgacagaacttcatcttgatcttactttagataagctacaaggcccaccaaaagagcatataaaagttcacaattattgggctgctgttggacttgatcgctatcataaagactctaaggctgaatttgaatttaccattgacggaaaatccagcaaaaacattgttacttgggattccaatttttcaaaagtaacaatgaaggaggataaagatattgctaatcacggtggtgttgcattggcttggtttgtaatgtcagtaataatggattacaaatatgtagaacaaactgaaattggcgatggcgttgactatagattttctaaaactgaacctgatgatgatgatttgaattttcttgacgaagaatatcattatgtagaaatatccggtattttggaggaaaacaaatcaaataccttaataaatcgcataaaaaagaaacacgagcaaattaatagaggttcaaaaagagaccaatcatcatctgtcgttgtcacactttttgccaaacctacaaccataaaagaaattcataaatgaaaccaaagttacaacatagagaagctatggattactcatttaaggctaagcaggctttagatgaaggtgactttgatgcttcattagaactatacaaaacggcagctaaattagaaagtgaggttgcagatttctatttcgacaaaccagaccttgaacccacaaggagtatactggtaagaagtgctgcgtttttaaatttaaaagctggacagatagaggaggcacaaaagtttattttttttgggttaactaacagtaaagatgaagaggttaaggaacaattgtatgacgccttagagattttagtttctttaaaaaatattaatccttttgggcagacaaaagaatatacctatttaagtattcttagacaaaatagcacacattatactattgagcctaccaagcttgaatttggtcattctgttactttagaaatgattaaagactttacagataattatttgaaatcattaaaggcatatgcacttactaaagttaggcgtttggtcaaatttagagatgacagtataagtgaacttcaaaaagaaattgatagaattattaatccggtcatcacaaactcaagttatggaagttttcgattttcaattgctaatgattggatgaaaagaaatgacgaagaaaaggaaattgttaatttaaaatcaaatattgttaaaaatttccataatgaaattttcattaatcctcttggtgaacaagaaattaccgaaatcaaagaagaattttcagaggaggaaataaatgaaatattcaggccattagccaaaatcaaatcaaataattccggttacagcattggagtttatgacacagattcattttcaaaaaagtatattccaaaaattgttaacaagcaaaaaaaggaattacttactacaaaaacattgtcacaagaggatataggtgagcttgttactacaattgctcataaacgtgtttctgaaaaaggtaaagtttcaaagaaaacaattagatcggaagaattcaaaaaatatgaaacgactttcaaactaaaggagattgtaccaaaagacaaaccgtcagttttattatctgaggaaattctgatagatatgttatttgattcaaatatcggttttacattttcatttgacgatttcaaaatatcatacactgatatcgaatatcagaaagcacttgacggatttaataatagtttttattccaaaataatttcattgattaaaaagactgatttgaacactgaagaaaatgatgacctaaaaatcataagtagatatatcggaaatcttgatgccttgaattaaataatatcttaaactacttttttaaaaaaatcagtagtttaagttattatttgttattgtttctccataagaattcaaatttcaaagaattacttcttaatgtgtcaaccgtctgtttaagctcttcgcagtaatcacttagtccaagattcatttcaatttcagtttgaattttccaaagtgatcgacctaagtaattaatttcgttccttaattcaaccattctatcttcggacattttagagttcaaaacaaaatttgactcagaacatacgtagtcatcacctgcaagcacatattcattatcatcagtttgaataaatcctagttcgagtgccacttttttcgacgcatcagcaaaagattttccaatttgattttctgtgatagtaattgtttgctcatctctattaataaataagtgaaacaaaactacatccttcattgagttggtcaaatgtccattttttctatgttctggtacaacataccaatgtaaatcactatacatatccaagactacagctacataagttttagtttcatttttaatgaagtaaaattttttgaatccgtctgaagatgtaatattatcagttattttcggtttatttatccagaccttagcgaaatctacattcgggcttaaaggtctaagataaataacactttttgttctcttacctttattatttaaatcatctattaatttttgtaaagccttgtttgtcataagtatttggtaacatcgctatgtaattaaaaagtccctgcagctagtaaatcaggaacagattaaatctacaaacattttttttctcttatattttaatgcatttttattgtagaatgattttacccaagcaaggtagtccgtcttcaaatgcaatggattatcgttccctgaaacttttcccgacatttctaaagctttagatcgcgcataataatgattaaaaattcttacaaattcagtaaaataaagatcacttaaatccttatcacctctaattaccaaagtattctcatcattattcaaaattgaattatcactataatttgcagaaccggaaatgacaataggatcttcacctagaggatcaataagtataattttattatgaatgaaatttgtccctactccacttggctttgcattcaatagtaaacctgaatgtttttctgcgagccaatcatatagaccatcttttaaataagttccataaattattacattatcataatcgtttgaaactaatgtagtatgtatagatctattattatctaagatgatgtatttgagattttctgtatctttagttattatttctttcatatgcttactaaaagaaaatggaaacattccacaaataagactttttgaattatccatatattcagcatacgttttaagaatagttttttgttcgcggggactgaaaaatacggttatacccttgttaagattatcatacaatatatcttcttgaatttccaaagtttgcttacctaacacttcgttaattggatcttgtgctaaatattcccaatattgatgaaatttttgagcgacctcttcatctctgataatgtgagcagcgttacattgaccaaaaattccttttgctgttatattggtagaccccgataatatctcaataggtttaccatctttcagcagtatcataaatttattatgagcaatatagcttttatttgcttcttcttttcttggaattaaaatttgtcttggaatgcctgcttcatttatggcaagattatttgctttctcctctcctctggaatcataaattatcttaacatcaacgcttctatcttcatatgcatctttcaatgcttctaaaatgggcaaatattcaaactcgtaaaaagcagctctaatactatatgtttcatcttcagcttttttgataaagttcaacaaagcatcatccaagcccttaccaagccactttaatgctctcaaagaattctcttcagatactccctctgaccaaggtctgatattcccaaactctctagcatatgctaggctccccgctaccccacggttaaaatacactgagtgttttgaagtactttcgtcgggaatattaaccttgattttacagccaggtctatgctctaaaaatttaggctttccatatacaggaattatattgtagatataatcgtaggttgattttacagtaaaatcctcccacataaatgattggataggatgctcaaagctgctgaataattcattttttactgcgctcccaacagtttcttcaaaatatttaaatccttttaaaaagtacttttcattttctatcaaatcttctctttcgatagaaaatcccagtagtccctcagtttgttgttggggcatatcaatcgaaagtatcactgctgaagttcctgcaacgcaggtcacttcaagtccgttctctttagcacgtgttctcattgcattattgttttcaaggttaattaccataaagataataacaaactatattacaatgagttaaaaataaattaattttacaatcatatgataaaatttaaaaagtccgcaacctttttttaaaatattaggaatggaattagataggtatattttaaaatgtggttgctccatataggcaaaaatgcgttttcgaccataggagaaattgcatttttgccacccgatttccatcaggcaacttttataggctgtgagttaaaattttgaagattcagaaaaaatcccctgttttcggtcatcccatttcgaaataaattccagaggagtgagcctcctaattgggctaaagaagaattaataaataaatcctgtttctcaagtgcttctgccaaactgcaacttggagtatcatctactgtttctgactgtctcaataaatcaccgtattcatcggttataaaagcaagattggaaaccgtttcatatttttgagaatcaggctgtctaatatctccgattgtcgagagtaatacctgtcctgtacatttactgtttccaaaatccatccaatattttgctgtattacgatgtatataagtatcatccaaagtttttaaaacctcagcgatttcaaatcttgttttcacattatcgacacaggaaataaaaatattggcggtcatattactcgtaatcctgtccgaagcgtctctttgaaattttctagtctccgctttccaagccgttccgaaaaatcggtttgtcctgttgattaatgctgtcgctttattaagtccaagttcgctttcagcaaaaagctgtctgccgagatttgcttcttctaccctatcatcatcccataacattacagaaagtccgggatgatccatttcgttaagcgcataatttattctgcccaaagcagtaagcatctgcgaacccgttcctcctgcccctatcagatttatagatattgggtttgtcggctgaataaaattactataggtaaaatgaactcttggcttattatttacaattgaattattttgaatattcattacagtaggttttttaatttaagattagattttataagcacatcatttggaaaatcctttctgttctgaacaaggtctttccaaagcgagacacaatttccctttataggattatgattgtacattaagtgactgaaataggaattgaaaaaaaaatgctcccaagtagccgtaaattcttccaaggaagctgactttttaattttagtatcaacgttccccatacaaacactcccgttatcatagatgttaaaaaatggtgcgtgatatagcgaagtctcttctgttggtcgctgattgtaatcaacagcaaatatcttcaaatgcagtttatcagcacaccaaattaaggatggtactttcgctgtaccatttggtatttccaaatccttagaaaaatataattctcgttctgaaaattctgtgtaccaaatcacttttgcattttctgaattgtcgatgagtaaaatattagaagaaataattccctgtggtttaagaaattctttttctctgcaattttgaattttaagtctttttgctaaatatttagcttcgttggttgtaagtggatgtgcattaatgggactgccatcttcatccatatcaaaatattcaacgtacatatcagaaagcttatcatcactttcgtagaaaactaatgctgattttggatgataaagattttcaaaatcttctgttacatcttttgcttcaatattattattttttcgtttcataactaattcgagttaagatttatagacttgaaaagtcgccaagtattcctgcaagctgattaagaatttcaaaaacttcactttcaaaatccagactgttatctgaaacttctttcccatcaaaaactttgaaaacaataggttcttgaatttcagcatattcattgaattcattatttacactatcgataatactttgatatgcccatcctctatcatcagcaaaaaatgaaatgtatttatccattgaaataacggcttcatcattttcatcgtaatcgaattcatcatcattagagaagtccttattattattaaaatgtatgtttctatagatgcgttcttcgggaaatttgctgtataaggagaaagctttattagcaagattcaaacattcaacatcaaaactatcttttgctttaaatgaagttacacgctgttgaaaaaatgacaaattattgatagatgcaatcttctgctccataatatcaccaattaattcagcctgttgtaattgctttttatattcacaattttcatccaattcttcatcttggtcaatccagtcgcttagcatttcatataaccaaaataagtatgaagcttcctgtctgtaataaggaatatcaataatccgatacagataagtgcatacagaaagtagcatttgagctgtttttctgtatttcttatgatgaagcatattatgaagaggaacgacaggaatatagtaaagagtcattcctgtactgattctttcttcgctcacaaaatataggcagttacctttgtgctccaatttaatatcctgccaatttttgatactcgttttcatttgctttcggcaatgattcagagatagtgagatgttatatggaaattcaaaatctttatgatcagattgagaaagattataatgctctgacatttgggaaagggatttataaaaatccctctccaattttattgtttttgattttgacaaatttgatgttgtgctacattctttaagctttggcagaaaagccgttttcagaaaaccattggtatttgtgccaatgggacagactttctctggtctttctgtacttccgaactgtctttttcctgcttcatccatttcataaaatcgcctacctgctgatgaacctgtttttgttttttttcttccggaattactatttttccttttataatattttgttgcattcatcttaattttgatttaattcataaactgttatcctttagttcccattacactttcaaattgatattgaatagtgtcatctttaatcagaggagcggaaacctttgcagtggtaagaattggataattattagcataaaaattcatcactgcttctacactccattttggttcggggtctgtcaggcgaatatcctgtccattatctttcagaatgaaaacccgttctaattgtgttgcgagtaacataatctatatttaaatgttggaaatttcttgtggttcttgtggctcggaaaaaagacttggagcaagatggacttcatattgttcctgctttttcctgatgttatctgccttatcgggataatctgaaattttaggtagagcagaccacgcatctttatatttgccctccttttcaaattgcactgccttttgtaaggattcagtaaattttttatcctttgtttccttttcttttttctccttatcacttttctccttttccattgcagatttcttcttggcttcttccatctgtttcataaagctttccatatttaccattaaacccgaagcagtctgtaatggtgtgcctaccgtttcaaagaatccgttatcaagctcttctgctgttccctttaaattaacaggtggaatcaattttcttgcttcgtctccacactgctcattattgagcaatatggatagaacaaagccattttcttctgttggtcgaagtatcaactgcaagtcaccttttaaattaagtttggcgagttgtctaaaaaaattggtctgcatagctttcaattaagttgtctgtgttaattcgttcagagaaaattggagagtccaatattcagtacccaaatgcttttcaaaagcattataaatggcagtaccatcagtaaaaacctgcatctgataacagtttaatacaaaatccaatggtttcaattgactgatttcttcttcattagtttccacgaaaaacatatcattgttttgaaaccaatctttaatttcagagaagctttcatccgtaaacctaaaaaaatcaactgcttcatctttataattaagccatttgaaaaaagtatcattttcaaaaggttttacagagtccaatctttcagtacataattctctccattgttcagtagtatgaatgattgcaaaatcactaaattcatttgaatcgatggatttgataaaaagataatctgtaggaatttttgatattttcattgtttaaattttaaattaaaatggtaaatcatcatccttatctccgactaaagcacttgctgtttgtggtttggcttcgatggttgaattagtattaacatccgccttacctcctcctccgtgaactttaataaatgatgtgagaaaatttagacccgaacgaatctctccatcttttcctatccaagcacttgcacttggttttcctgtcagctctaccaaagtacctttggtaagaattttagctacattagaactaatccagtatgaacagttataaaatgtggtctgttctactctatctccttgtttatttttaaagctatcatttatagctactgaaaaattaacaacttgtctgtcatttgctaatgcgttaacttccgcattctttgtaattctgcctacgatgttcataataattgaatttaaattgtttaaaattattttcgttttctaaaaatttcttgagtgaattgatttggtatcgaggacactcggttttctctattgtttttcctaattggaaatgattatttatatatttttttgatatttccgaagatgtcaaagagcataagttgaattgatttgtataactgaggttccggtttttctttgcttatgaccatagaaaaagagcaggcgcataaaacccaaggaaaaagagtcactaattatatttattttcagggcttgaaatatttttgtccgaaggatttaggagtttctgacaaattatcggaactggtgtagaaaattttttagatacccaaaaagatttttttgtgagaaagcctcttttctacatttgcaattgtaaaaacaaaaacacagttattaaatcaacttatcaatttacactggtgaataatatcaaactaattgcaatacatattgtttacaatcggtttatttgtaaagatgtaaagacataatttttgtactaaaagattatattttttctttaaaagcaaaagcttaaattccttttagagaaaaaagaacttttatatatttttagaaatacttttactgtactccactattatcctgcagcagctgtttgagaggattttaagaatgagtgtgtttccgaaagatagatgatcgcttttccgaaaaagagatcagtgcttttccgaacatcaatcaaaatacgaatgagtgcgtttccgaatttttcaatccaacattcagtatttatccacaattatcaaaatttcgacaatgtaaagagttcgtttccgaatctaatagtataaaagagataattttcgtccgactagttgggtttaggagcgcttttccgaaatatccagagtgcttttccgaaataaaatgagcgcctttccgaattgaagaatttgcttaaaccgattatacttttaaatgacatagtcataggcgacaaaataaactcaatggtcacatatgttcaattcttaatcatagatcgccttgaataaaacttttgaatattcaattatgactttttacaatcataaaagttcactccgccatttataacaattagtttaatagcagtaatacggttaaatatgaattttgtaaaataatttaacaaaagaattactgatgaaaaacaacttttttatgctgctttgtttctgtgttaattcatttctgttttctcaggtaggaatcaacacctcatctcctgagactacttttgaagttgtaggaaaagcagaagacatcaatcattatgatggaattctccccccacgcattacgggagatcagttgcagaaaaaaacatacaattattcaaagaaaggtgctgttatatttgtcaccactgcaccatcaaacttatcaggtcaggtagctgatattacagagccagggctatattactttagcggatattcgtggaaatctatatccaatcaaaaggaaccaatagaatatagaattattctgtcatttgataacagcaatgatgatgttctgacagaatcatcaaagtggtctgagcctcttaatctttcgtctgacaaaaatgtttacttaacatcctcaaaacattattcgataggaacaaaaaaatatggaggctttaaaggctcggtaactttaaggaaattagaagggatagtgaatataaaatttgaaattagcagagcatctgatgcacctaatgttttagatgatgttttatttgatatttcgggaatatgcaacgaaatcggatactttcctaaagatatagtttttatgcaaaatgaaaattcaacttatgtaattccggtactgcttcaaaataataccatatatattattgcaggaaacttaaatatgataaactcaaacgccactggtgaagtgcaaggctactcaaattggatcaaacctcactccaaatagctataccacaaaagtagattctaaaaacatagtgaactataatcaaataacaaaatgaaaaacaactttctaaaactattttttttattgataagtgccaactttttctcacaagtcggtatcaatactcaaacgcctaaagctaccttagaagtagtaggcaaaccagatgatgccaatcatttcgatgggatcattctaccaagaattagtggagatcaattggcaacaaaaacttacactacagcacagaagggagcaatagttttcgttctatcacctgccaccaatttatcagggcaatctgttcatcttgaaaagtcaggtctatattatttcgacggtcaaaaatgggttccattacttcaaagtgatccattggaagttgtctctcaaacaggtaatacttccacgctggaacttattgtaaaaaataatctgaagcttgattttgatcaaaaagaaaattatatcatcggtaaatctagaagcactatcgccggtgaatacaactcaatttttgcaacggactcaaacataacttccggaaaagggaattcggccagtgcctatgcaatgtctcaaggagaaattactggaaaactaaattatggagcgggggtatcagcactaaatggtattattaatggaacaatttccggaaacaggaatattggaatcggtgcaggagcaatgtcatatatcacatcaggcaatgataatatttctataggatatctgtcgggtacaggcaatagaactggatctaataatgtttttattggtgtcggtgcaggaagccccgcatctggaaatagaagtattagtaataagctggcaattcattcaacaccagtaaccaccagttcaacaaatttttgggatagcattacaaacaattatacagactataagtttgcgctaatctctggagatttttctgaaagatggctcaatatcaatggaaaactgagtgttacaccttcacaaatgcccgatgcagacggagatccagcttacaccaaaaaagttgtagccaaagcggatggcagctttggttttgcaactgaagtaattcctattcccccatcaaatggaacctttatattaaaaagtgtgaacggagtgccaggatgggttactcaataagattaatttcaaaatgaaaccgctactattaagtagcggttttgtctttactgaaaacatcatcaccttatcagccactgattcaaatctttataatgttggtacatccaggaaaaatcttcaacatttttatagctgttgcggatctgctctacgacagtttttcccgttttatcattatcaagaaatagagatatttttttgtatttctttagtattttatctcccgctaagagcatcgatgttgaattaaagactaaataatctgcatctgaagaaaatttatcatcttctatcgttttatatgacaaataatcaaaaaagccctcaaatacaacaatttcattattttgctgatttcccttctttattaacgtcacatcttttggtccgaggcagattttagaatatttattacggacttcaatacctcctgaattattaaaaaaagcaatcgcaaaataatatttatcttctattttgtaatggatctctttgataagacttttacaattcaaaactccccttgacttaagatactctagcaacgcaggatgctcgacatcgattgtttttaaaacattataagtaaagccatcatttgtttcaaccacattatctattgtaggcgaaaaatcaagcttatttaaatattcaagcgctgttgaaacattacatttattaatagcttgaactattgatataacatcatatattttacctgttccaaaatcaaaagctgtattcttaatgaaatctacagacaggctggctgttttctcttgtctatctaatgcaaaataaaatgctgttcttttgttttcttttacagggaatagaccataggattccataaccgtcctgatactgacgttttgttttatttgctcacaattcattgtaaataaaatattagattaattaaaaaatgacgggatatccatccggaagaaattttcccattcttgtgtcccggtaaagttctatcataagttgttgtatctcctttaaaaataccttaccactaaaatcagaggatcgtagttttaattttctattttttttgataaagtaattgtaagatttctctatcagctctcttgtctgtaatatatttcgataatgatatgcgaactgcagcatttcctgctcctgcaatctgtacctttttttaaaataattaattcgataggtgatgaacaagtgttcgctatctatattcaaatctgcttcctgaattttttcagtggaatatggatgaattgcaatgttttctcctttgcatttgaaattaaatgacactgtactgtatttatcgagactgcccttaacctgttttaaaaatttaaaacaaaaatcatttgctgttcgataatttaagtcaaacttcgaattaaatgttgacagtttcaatacagtgccagttgatggaagtttagccagccaaattgcaaatatgatatgtttattatttttaatattatacaccaactgataaagcatataattatattccggtattacaattaatttcttcagccaataactgctgataagaaaagatgtgtagcctctttcatcgtaggttggtgttgatataagtcctgcaaaagttttgatttccttaccttttctattctgggacttataccatcccatcttaaattttgctaaaaactcataggcattaattacctgctttgttgagccactgggagaaattttgctattcttaattttaagcagggcgaaagtattattttcagtctcaaaatcatcatcgaacaaagagagttgcttcggacgatcttcaggtctgaattgttcattacttataatagagattatattaaatataacccttagcgcattgatgggaatgttggcggcttgactattttcatcaaagataaaatcatcaacaaaatggttgcctattcttatactctcaggaattctttcatttttaaattccttgcgaatgattttctgactgctatcttgtaacgacatcatctttttctttattgcagtttattagttcatattcattgttaattagaactaaagctctctcaacgtccaggacaatttttcgcccctcctgagtgatcgcatctttaattttaccgctcttttttaatctcatagcagatgaaatactgcaattaaataacttggctatacctttaagaccatacacatacttttcatcaattattttattttgctgcaaggatctctttgtacgatttgttatataaatattttcatatttaaataaacttactaattcctccccggtcatttgccaaataagcttttgctttagtttattaatttcgttagacatcgatcgcatttttattagttatgttgtcttctgcgatttttcttaaaatccgcttcacattcctcggtaatttcctgcaaggtctttttcttgcctttagaaatccagttcagtatttcttcttcaaaaaaatatagtttcttaccgtttttgtagcatgggatttttctttctctaacaagagtgtaaatggttggtttcgctttaccgattaaggatgctacttcatctattccgattggaatttttttgagaggtataacaacatcttcttttgataccagatgctttatctcagcaagttcacgaattaagaaggcgactgcttgtggtaaattttcaaatgaaatattttgcaaatccataatacttgattttaattattatggtgcaaatgaaaaaagtgttttcgctgtgtttgaaaaacacgacgaaaacacttaaaacactgtgtttttgtaatcgatattaagcaataagtttttacctactgttgaaacttaatttttatagctcattctaaacgtattaatcaattaaaatttatttactaagattattttaaaagattaattttcaaatggtaaaaatgcagatctcatacgctcttgttcagatctgggtattccaatctcgctagcaatactttcccatcctcttacaaccgaaatgactttttcaatgatttcatccatttcattttcgttcagtctaaattgagcgcccacttccttagcaagttcaagatccaaagcattattatctgtatcaatatttagagcaagtccttctttatccacagacggattaatgtcataggctggtgaaagtatccatccttttggggttaaaataaatccgtgatttctaaggtgatcatctgtgtttgatatacaaatactaaacacgattcttctccataattccttcaaattattgttaacatcaataccgtagttcgtaataaaatcaacgatatcaaggtaacttgcagttgaatctcttaatttttcttcattgtttcctgtcatagtcatagctgacgaaaaatgaattcttccggagtttgttctatcaaatcttttggtgaaaaatgtatgatagctgttacttaatttttgaatctttgtttctgacatattaattccggcatcagtagctaatcggtatgccagatattcccacgctgccttatcaattgtatcattttttgaaggaaatttagcaatccataaatttttttcctgatccataacattagctttcggtcttgcaccccctaatgaagatcctggaactacaagcagtgctaataaccttttcattttaggctcatcttcattttcaaaacttttcacggctgcctccaactctcttaatgatgaccagggtggtgtagggttattctcatcatcatctaaaaaatttccatctattgaagtcttaaatcgcagagcacccatccttgtttggtcatacactcctaataaataatccagatcataaagtttcttttctttctctccagtttctttggctacctgaatagattttcttttcattagtgttcttccccaagtatcaggcatactatccataaaaacaccaaaattttctttattggttggatattgtggacctccaaacaactgaagatcaggatctattaaattttgacccgcacttttaatccactctttatcatattcaaaactaaaggacttttttcctttaccctgatgagctgacaaaatccccattaaatgaggaccttgaaggtcaatccaatctgcatatacaaatatgtcaactttagtagatttcatttaattatattatttcagtaattctaaatcttgcaattttcttccaaattcatcatcagatccaagctttaaaatatcatcgctaagacccaatactctcaaaacattaaaatatgatcccattgccacacttggatcacctttttcaataagatgtagtgttgaacgtacaattccggctctctctgaaacctgctctgtagttaattttcttctttttcgagcaagtttaatattctctcccatttgttccagcagagccaaatactttggtaaaattatttgtttctttttcataatgtccgttatttcatacaaaattacacattttgtatgaaataacggacattttaaataaaaatctcctccatttgacttttcaaataaaaaagactaactttgtattatttcttatgtatacataagtaaataatactacgtactaatgaattttgaaaagattgttgatgcttatattgctggtagtcctcacagaaaggctttaaataaaaaggaatttgattatttggtacaggaaatttcgagttttcgcaaattcaaaaaattaagtaaagaaattagcgaatacatacttcaaaaacattacaccttagaacaagatttatatattttcaatgactccaatcctgaagttgttgacttggtttatgcgtataacaaatatacacactttagccaccattcagcactaataatgcatcaaataagtactattgaaaacaacgccatctatttatcagaagagatcgatagcatttccagtcctaaaaacaccttaactcaaggaaatatagatttagcttttagtaaacctcagagagtcacaaaaaatataaagcaattcagagacaaaacattttactttcttaaaaatcaaagcagtactacaatggaaaccttcattaatggagtaaaagtttcaaatcttgaaaagacacttatagactgtactgtaagaccactatattccggtggaacaaaaaatatccttaatgcatttgctatggtaaagcaattaattgacgcagataaattacatcatcattataaaaaattatcatttgtatatccttatcaccaagctattggattctacttggataatgcaggttataaagaagagttttacagtaaatttctggcaatgaatagtgattatgatttttacttagactatcagttaacttcacctcagtacaatccgaagtggcgaatccattacaatgaagacattatccaataaaaaaattacttataatttatctttatcttttcaaggaaatttctgcacacttcaaagagttgaaagatattgtttgcttggataatactatgtctttgctgaaaaagagtttctctaaatgattctgcatcaaagactgcatcagatggatcttttgtcagggctaaattaacgctgataccagttgtcaaatcgttgttcaaaatacttctgatatcaacaaggggctttagataaaaatttaattctccaatacgcccctgactttttgaaaaagggagatcgtgatttttgccgagtacatccatatactctgttagacgaatcctcattaattctttctgcctctgaatatcagtataagatataagttctttctttatcgggtcaatttcactttcgatccgtaagatttcgtttttggtcacttctatatcaaaaagaggattatctaatttatcctgttctatagatagcgaatttaatttaccttcaatttgttgcagtaaaaaaggaatattctctacattcttcattttatgtaaaatctatttatgataaaatttcttctaaaaaaatttaactattaataatgtattataattttttgaaatattcccgacatttaagttcgtaaatggatagcttcagaaatattagtaaatgctcaataatcgctacgactatgcaaggagttaagatatttattatactaaaattttaaatctctttttattttaatgatacctttttcatcatcatcttttaaatgacttttaattgagtccgtttcaacatcttttagtgaatgttgaaaaacttcttttaaaaacaatgctacttcatattgatttcgcctatcaaagtgcttccaaatgttccagccaaaatgatacaaatccatattagataatttgtgaacccttacagggctaaaattttctattttttctttcttagcatactttgtaatgtagctgcataggttttctaaatcattaacagatgtgtatagcgcaaattgctcctttgtatatcttaatgcaatctcaagcttattatcgaactttacaacttctttaaattttaaatcttctttaatatcagcaatagtaacaggtccagaaaagaattcattaaccaaaactagattttttcttttagtaataattctgcttataatttcatagatagtatgcaaaaacaatgttagacctgaataaataacaacacctacgaaaatcacgactataaaaaagatatttgccgtaaattcatcggaccctttatcgataaaatatgttctgacttgagttcctaaaaggatacataccactataatgggtaaatacatacatattaattcaaaatttttgactttcatatttattagtttgcttgtataatttcttggttttcttctaaaatattttcatccagcttaatagctccagctgctctatttttcagttcatcaactactttagcataaacttgagttgttgtaactttactgtgtccaagcattttactaactgtataaatgtctgttcctaaagaaagctgcaatgttgcaaaagtatgtctgaagcaatgaaaagttatatgctttgttattccagctgatttgacccatttttcgagaggtctcgaaatccaagagctatcttgtaaattttcaaatactagctgttcgggaagtctcggagttccgcataaatgaattgcttgttcagaaatcggtgtatactcgactccttttgttttcttttgtctaaattgaattttgattctatttgactgaacatcaatttctttccacttaagccttttaatatcacaatgtcttaaccctgtcagtgcagaaaataaagatgctcttttcaattcatcattttcacaaggagtatttactaaaagattaagttcctccaaagagagatgttcacggaaagattcttgctctccaatacctttaatctttgctgataagtcaattataaaataaccatcaataaaagcttgggaaactattgccttaaaaatagaaaagtacgttgcagcactattatttgaaagaattcctttcttttttccgcgatagggcgccgataaaagataaagcttaaaatcatcagcaaaactcaaatcaatttttgaaaatcttaaatcatctccggaaaactctataataaattcaattaaacacctccagttagttctaattgaatcagaactattatttgagccgtgtcttttctttagcaacctattacagtaatctataaatttttctttttgtttttcttgcaattcggccttaatagcatcgctatcactatacaagtcgacattatcatattctttttggcgtagtttacgaattccatcagcatataacattgtctccctgtcacgctcactcttacaaactataattccattatcatcacgctttggtttaaaggcttttgtcccgtcctttaggttagttctgcttgttctttttttatcccattcaaccgtataaacaattctattgagatactccctagaacgttgcggtttattttttccagcaataaatacaggataactctccaaatagacataccattcatttctatcctcagctttacgcaatctaactgtaacttgagtttttgaaagttgtttcataagcttaatctatagtaccattatataatttgtcaatctcgctttttggagcataaacataattaccaatttgacgggtgggaattgagtactttctgatatgcttgtatacactcgtatcgtgtaactgaaattttttggaaatctcaccaatagtatagcaattctcttcagaaagatcatacaagttaggattagaatttttcttttcaatcttttctttagatgccggaggaaacatttcttgcaaaacttcacgatttacttttattaaacgagttccttcattaatagaaggtattacattttgtttgataagtctataaagtgttctttttgcaatgtcaaagagtaaaacagcttcagggactgtcaagagaattttatctaaaggaatctgatcaatcagttcttgtctttttaattctaatttttcttgacgctttcttttctggtaagcattttttatacactgctcacgacaataaaatgaagttactgtcttaggtataaattcctgcgaacaatgcagacattctcttttaatccttttaatcatacatatagaaaaactaaaggtaagaaaaaaaatcttaagtgccacatcttctctgcttaagtgccggtacaaatatggtacaaatgtgtaataaaaaacacttaaaaaagcacaaaatcaaaaatctttgaaaaaacaaaaatccccacaaacatacgcctgtggggattttctatattttgttaattaatattaatcaataactacttaacttcttcgaagtctgcatcctgtacatcttctgcacctcctgcatttcctccgttttgtgctcctgcatcagctcccggctgttgacctgctgcatacaattcttctgaagctgccatccaagctgcatctaaagcttctgttttagcttttacatcatctgcatttttagcttcgaaagctgttttcaattctccgtgagcggtttcaatggccgcttttttatcagcagataatttctcaccaaactcttttaattgcttttcagtctggaagatcaatccgtctgctttgttgaagatttcaacttcttcttttttcttagcatcggcagaagcattttcctgagcttctttcttcattctttcgatttcctcgtcagaaagacctgaagaagcctgaattttaattgactgctctttaccggttcctttatctttagcagaaacacttaagataccgtttgcgtcgatatcgaatgttacttcgatttgaggaactcctcttggtgcaggtggaatatctgtaaggtcgaatctaccaatttccttgttatcgttaaacattggtctttctccctgtcctactctgatgcttacagccggttggttgtcagaagctgtagagaatacctcagattttttagttgggatcgtagtgtttgcttcaattaatttagtgaaaacagaacccatagtttcgatacctaaagaaagtggcgtaacatctaataaaagaacatcttttacatcacctgtcaatacacctccctgaatcgctgcaccaatcgctacaacctcatccgggttaactcctttagacggttttttaccgaagaatttttccacttcttcctggatgatcgggattcttgtagaacctcctaccaagattacttcatcgatatctgaagtagataaacctgcatctttcaatgctttagcaaccggctccatagatcttcttaccaaatctgcagataactgctcgaatttagctttcgttaaagtcttcactaagtgtttaggacctgtagccgtagctgtaatatatggaaggttaatttctgtctgtggagaagaagacaactcgatttttgctttttcagcagcttctttcaatctttgtaatgcgattgcatcagactttaagtcaaccccttcttcagctttgaattcatctgccatccagttgataattacatcatcaaaatcatcacctcctaagtgtgtatctccgtttgtagacaatacttcgaatacaccatctcctaaatctaggatagagatatcgaaagtaccacctcctaaatcgtatactgcgattttctgatctttatgatttttatccaaaccgtaagccaatgcagcagcagtaggctcattgatgattctttctactttaagacctgcgatttcacccgcttcttttgtagcctgtctctgtgcatcgttgaagtacgcaggaaccgtaattaccgctcttgttacttcctgaccaagataatcttcagcagttttcttcattttctgaagcgtcattgcagaaatttcctgtggagtatattctctgtcgtcgatttttacttttacggtatcgtttggtccggaaactacttcataaggtactcttgaaatttctttcgcatcctctttaaagtgagttccgataaatcttttaattgaatatactgttttctttggattcgttaccgcctgtctttttgcaggatctcctacttttctttcaccatcttctgtaaacgcaacgatagacggcgttgttcttttaccttctgcgttaggaataacaacagggtctttaccctccattacagcaacacaagagttggttgttcctaagtcaattccaattattttactcataatatttttatattttttctaatttttaattttaatttacactcagtatttctcaatatttataccattcaaaattttgtgacaaattgacagaaacaatctgaaacaggaaaaaataattttatttttcagcttgaaaattttagaaatacagtttaaaataaacctaaactttactttttaaatgatttgaatttttgtcacaaaacgttttaatacttgttaaaccatatcaattttgtcacttaacggctatttattatataattcatttattttaaattaaaaatacagaacggaactgcaatttttcagatagttttaataactttaatggattgcaaaaatcatccggtttcagaatccttttagctctaaaatttaattaaagcttaacgcaaaaaggtttcaaaggataccacgaattattatttttgataaattatacattagagaatgtcattacatttcaatccgagagatattacctggcttgccttcaacgagagggttttacaggaagccatggacgaaaaagtccctttacatttaagaatccgttttttaggaattttctccaacaatttagacgaatttttccgtgtgcgggttgcaggtttgaaacgcgccatggatttcaaagaaaaagtaattgcagaatctttttatcagccgccttccaaaattctccagaagatcaatgatattgtgatgcgacagcagcagaatttcgataaaacgtggaagaaaattcttgctgaaatggcggaacatcatgtttacattaaaacagctaaaaatttatctgctaatcagaaagagtttgtaagaaaatattttgatgaagtggtagaatccaacgttattcctattctgcttcatgaaaatacaccgatgccttacatgcgggacaaaagtctttatctgggtgtcgcgatgaggaaaaaagattggcaatattccagcaattatgccattattgaaattccttcaagatttgtaggaagatttgttctgcttccgtccgaagatgtggaagagaaaaatgtaatgcttttggaagatgtcatcaccttcaatttgcctcatattttctcctatttcggatatgatgaatttgcagccaatgctttcaaagtaaccaaagatgccgaactggaacttgataatgatatccgtaccaattttgccgaaaaaatagaaaaaggcttaaaaaacagaagaaaaggaaaacccacccgttttgttttcgataaagatatggacaaggctcttcttgagatgctgatccgaaaattaaacctgacgaaaaaagacagcattattcccggaggaaaaattcataattttaaacatttcatggatttcccggatgtttttgagcgttatgaaaagcctgttgaaagaacttcttttacccaccctgcttttgaaaatacagaaagagtaacggatgttattctgaaacacgatgttcttctcaccttcccttatcataagtacaatcctgtaattgatcttcttcgtgaagcagcaatggatcctgatgtaaagtcgattcagatcacagcctatcgtttagcgagcagttcgaaaatcattaatgctttaatttatgcggcaagaaatggtaaagaagtgacggtaatgcttgagcttcaggcaagatttgatgaagaatctaatctggagtggaaggaaatgctggaaccggaaggcatcactgtactcattggaattccgaataaaaaagttcacgcaaagctatgtgtcattaaaaaaagatctcataataagacaattcagtatggttttgtaagtaccggaaatttcaatgagaaaactgcgagaatttatggagatcatctgttaatgactgcagaccgcggaattatggcagatattaataaggtattcaatgttctgaaaaaaccgaaagacgattatcttccgattttaaaaacctgcaaaaatcttctcgtatgtccgcagttcatgcgtgaaaagattgtacatcacattgataaagaaattgaagaagccaaagcgggaagacgagcagaaatgatcgttaaagccaattctgtaagcgaccgttccctgattgaaaagttatacgaagcggcacaagccggcgttgccatcagaatgattgtaagaggaatttactgtgctgtcaatcagaaagattttaaagaaaaaataaaggcaataagcattgtagatgaatatctggaacatgccagagtgatgtatttttacaataaaggagccgaagatatgtatatttcttccgcagactggatgacgaggaatctggattacagaattgaagccgctgcaaaaattaccgataaaaatttaaagaaagagttgaaggatattctcgacatacagttgaaagataatgtaaaagcccgtattttagacaaaaaactaagcaacgaatatattgataacgataaggaagagtgccgttctcagattgaaacctatcgatatttaaaagccaaaacgaataagaaatgaaaatcgcagccatagatataggaagtaatgcagcccgacttttaattaatgaggttaaaataaacaataaacagcccgaatttattaagctgaatcttttgagaattcctctgagactgggaatggatgtctttaccttaggaaagatcggcgaagaaagagaaaaaatggtgatcgactcgatgaagattttcagcgatctgatgaaaatctataaggtggaacattacagagcctgtgctacgagtgccatgcgtgacgcagccaacggacagaaaattattgaagaggtgaaaagaacttcaggaattaatattgaaataatttccggagacgaagaagcgactctggtttttgaaaatcatgttgccgaaggtttggataaagaatttgcgtatttgtatattgatgttggtggaggttctacagagcttaccttctacgaaaacggaaaaatgaaatatgaaaaatctttcaacatcggaaccatccgtttgctgaacaatctggtaacacccgacaactggaaagacatgaaggaagaaatccgaaaaaatatcaacagcaaaaaaccgattgttgccataggttcaggaggaaatatcaacaaagttttctccatgagcaaaacgaaagacggcaaaccgatgtccctttctcatcttaaaaaggtatacaaggagtttgatgatcttacggttgatgaaagaatgacaaaatacaatctccgcgaagacagagccgatgttttggttcatgctttacagatcttcaataatgtaatgacatggtcggaaatcaacaggatttttgttccgaaaatatctgttgcggatggtttaattcacaatatttacaccaaattacaggataagaagtaaacatattatagtatagaaaatttaaaagccgaccagattgaaatgatcggcttttttatttattgtttcagaagttttttgcttgatttggaggtttcggcggctgcgaagcagccgccgaaacctccaaatcttccttatcatacagttttaacttttacattcagttaaataatacccaaatttcaaaaaactaaaaaaaattgtataatttttgataccacataaagtaaaagcattactgaaaacgtcaacaacagtacaacaataaagaaatgaattcaataaaaataattctcacaggagcaacaggaatggtgggtgaaggcgttttaatggaatgtctagagaatccgaacatttctgaaatcctcagtgtaagccgaaaaccgtcgggtaaaaagcacgctaaactaaaagaatacattgtttcggattttttaaaaatagatctgaatgatgaaaacttcaaaggatatgatgccgtctttttctgtgcaggaatcagcagtgtaggaatgagcgaggaagaatatacaaaaattacatatgatacgacgctgcattttgccaaagcagtacttcatcagaatccggatatggttttcaattatgtttccggagcgcataccgacaaaacggaaagcggaaaaatgatgtgggcaagagtaaaaggcagaacggaaaatacactcagaaagcttggatttagagcagcatataattttcgaccgggattcatgaaacccgttgaaggtcaggaaaatgtaaaatggttttttaaacctttaatttggatttttcctgttttattaccatcaaaatcattaactttacaagaagtgggtatcgcaatgattaatgcagtattaaaagggtatccgacttcaacattagaaattaaggacattaaaaatctggcgatatgaaggaaatgttaaaaagaatttttctggtagcttttattttattggttctgacggcaatttcaggatttttttatatgcagaagcatcccatggaaggaaataaatttacgggtaaaaatctgcgtttttccggtcaggcctcaaaataaaaatatttttgggaaattatccgttctaaaatcgtttcaactgaaatcgatttctgcatttcatggctattattttctattattaacttaaatttattctttcctgttatttattaatcatttcttaaaattaccttaaaatctttgcaaagtagaaccttcatttttgcataaatttaaagtaagtaaaaaatgattaacaactacttgttaaaaagttctgttgtcgccgcattctttcttcagggagcggttttcgggcagaacgctcttatccattactggaattttaataacaatgcttcggcaacttccatcactactccgacttccactttattgggaggttcgatgactgccgtaactaatggaactactgaggtagatttcgccaacggaacaggacagaatttcaatatcgacaatttcaatgcgagaaacggagatgtttcaggaacgcatttacgttataatttcccgatcaacggaaatcttcagttcaatttgccaacaacaggatacaataatgttgtcgtgaaatttacgacaagaagatccggttccggagcaggaacgcagacatggaaatattctgtggacggaacaaatttcgttacttttcagacggtttctcctttagatgccaatccgcaaatcattacgttggacttttcagccgtttccggagtatctaacaatccaaattttaaacttaaagttgaattctcacaaggttccggaggaactgtgggtaacaaccgtttcgataattttaccgtagatgcaacccccattaatgcaaccgacactactcctcccaccgtaacttaccttccctcaaacaacacaaacaatgctttaacgactgtaaatcctacgatttcttttaatgaaagtgtaagattaacagacaattctgcgatcaacgattctaatgcacaaatgcttgtcgatttccgccttggaaatgcttcaggttctcaggttccctttacaacaacgttttccagcaataaaattacagtgatcccgactgtagctttaatccccaaccaaacatattatctggctttaaagccgaacatggtagaagataccagtgataatgcagtgacggcagttacttccaccacttttaccaccgcaggaacctcaatttcgctagataaaaactttattaaggtcaatgaaaatgcaggaactttagcgtttaaaataaatgttacaaatccgtcaaattcctctgtgaatttggtggtgaaacctgcccctttcagtacggcaaacagcagtgactttacactaacgaatcagacgattaatcttacaacttccacaacgagttataccgtaaacatcccgatcatcgatgatttactggaagaacagcaggctgaatattttgtagtaagccttgaaaatccggtaggagcaatcatttccggagacagcaatgcaacggtttatattgttgataatgataaacccgctccggttccaactaatcagatttctttaaattatatcggaagttttgatccttcgggaaccaacaccagttccacggaaattgtggttcatgatcctgcgacccagagattatttaccatcagttccatcaccgatgtttttgatattatcaatttcagcaatccgacttcgccaacagttgttaataccatcaacatggctccttatggcggaattacaagcatcgccgtgaaaaacggaattattgccgcggcttctccgaacacaaatccgcaacagaacggttctgtagttttctttgatatcaacggaaatttcctgaagcaggttaccgtaggagctttaccggatatgattactttttcaccggacggaacaaaagtaatgactgccaacgaaggcgaaccgaacgatgcttataccgtagatccggaaggaacaatcagcattattgatatttcaggcggaattacgaatcttacgcaaagcaatgttacgacgcttaattttaatgcttttgatgctcaggtttctgcattatcggcaactggtttgagaaaagtaagaacaaacaatacgctttctcaggatttagaaccggaatatattaccatcagttcagacagccagaaagcatgggttgcccttcaggaaaacaatgcggttgccgaagttaatttagccacaaaaaccattactggaatttggggattgggtaaaaaagacatgagtgttcccggaaacggttttgatgcttctgataacaacggagagatcttaattgcaaactggcctgtaaaagcatattttactccggatggcattcagaattataaggttggaggaaccaattatatcgtcactgccaatgaaggcgacgaaaaagacctttcaggattcagtgaaagaattacagttggtgcgaatgattatgctttagatcccgcaatttttccacaggcttctgtcttaaaagcttcttataatttaggaagattcagagtttccaatgcgaccggaaatacagacggagatgcagattttgaggaaattgcagctttgggagcgcgttcattctcaatcttcaatgcagatacaaaacagatcgtttacgacagcggagaccgttttgagagatatattgctgccaatcatccgttgatctttaatgcagataatgaatccaatactgttaaaagcagaagccgtgcaaaaggtcctgaaccggaaggagttgctttaggaaatattaacggacaaacgtacgccttcattacattggaaagaaccggcggagtaatggtttataatattacagatcctaacaatcctagttttacagattacaagcattcgagaatgacttctgcatacggaggcgataacggaccggaaggacttatctacattgccccagaaaatacaacgaccggaaaaggatatgtaattgttgccaacgaaatcagcggtacattatcgatgtatgaaattgctaatgctcctactttggcaaccggagaggttaaatctgaaaaagcaactttcaatgtattcccgaatccggtaacaaaaggaaatattctgtatttcaacagagcgcaggactatgaattgtatgatatgtccggaaaacagatcggaaaagagaaaaatgctttaacaatcgatacttcgatgctttccacaggagtttatcttataaaaacttccgaaggatatctgaaaagagttattgtaaagtagattatatagtatttggttgattaaatgagcctcgagttttcggggcttttctgttttaaagaaattcagtagttttaaactttgaaataccatgaaaacgcaattagaagaaatcatccatcaggtttaccataaagaaaaacgaaatcttttcacttttttaacgggagctgggatttcatccgacagcggaattcctacctatcgcggaacagacggaatctgggtaaaaggaactcagtttcataagcctgaagaattcgggacactgaaatattttaagcaaaatcccgaagaagttttgcaatattctcttttcagaaaaaaaatgtttgaaagtgcagaacccaatgaaagccattttcatttagctgaaattgaaaaaatactgcggaaccggtttcatctgattactcaaaatatagacaatcttcacaggcgcgcaggaaatcagcgaatttatgaaattcatggaaataaccgtgaaattaaatgttcgaacggatgtaaggaaattttgaatcttccagaagaaattaaaggcaaaaacattgatgaagatcttacagcaaaagatattgaattgcttacctgctcgtattgcggacactggatgcgcccgaatattttgtggtttgatgaatattatgatgaaaagaccaataagaaattcagttccctgaaagtggcaaaaaacagcggagtgcttttcattatcggaacttccggagcaacaaatcttccgtttgccattgctgaaaccgcattgaaatacggagccttcattgttgacatcaatacagaagacaaccatttcacggaactgattgtaaataaaaaaaataagctgatcatccgggaaaagtctactgaggttttaagggtaattaaagagattattgaaaatttatctgaaataatttgagatgagtcattccgaaatcaatattttaatcaaaaaagcgttgaaggctaaacacaataataactactggaatcagattataaaattaagaacatatgtaaatgatgaaatgatttcggaatgttttgaaatgatagattctgatgatacaaaatttaaacaaatcgggattgatattctatgccaattaggaaataaacgtggaaactttgttgagtctctttttgataaaatctttgaaattttaagaaccacgtcagatgaaaatctgatttgtacaagcctttttgccatcggtcataacaaccaatatttaaaaacaaagcatttcaaaactttagaacaatttaaaaattcagaatctaaagaaataagatatgcacttactttttctctactcggagttgagaattataaagccgtaacaatgatgataaaactggcacaggacagaagcctcagagtgagagactgggctacttttggtctcggaacacaaatcgaatgtgatgatgaagaaatcagacatgttttgtataagaattgtttttctaaagaccatcagataaggcatgaagctataaaagggcttgcaaacagagaagataagagggcaaaagctgtaattttgcaggaacttaaaagcgaaagctacgaaagcattttatttgatactctcttaaatataaaacacggagaacagtatattcctgatcttatggctgtctatgataaagtgagggatgacaaaaatattaatccacaatggattgcagatcttcaaaactgcattgaaatattaaaaatcaatcaataatcatgtttgcattttcattagatacagaagaaaaagaaagtaaaattattacctacattgatgaggttaaaaatctcgaaagcactaagacaaatcttggatatagagaaataagattaatcggtattgagaatatcgacaacttcaagactgaaatcgaaaaagctaccaagatttatgataatcagggcttttttcatttactggataaagataaatccattgtaacaagcacttttatcagcggaattaaaataataaagtctaaaaagatcaacattactgttagcggaacagtctggtttcatccaaaaggatttcataaatcctggaaaatgtttctcaacaatgaaattaccgaaagaaattcctggaaaaaactcgataaagatgagttacagggctggctggttttcgcattacatcgtatgaaaactcaacccgcaaaagaaaatctaatcctcaggcttgatggaaatgattttaataatttagatgaatttttttgctccttcggagaagaagtaaatggaattggcggatattttggcagacaattgtatgctttatacgattgtcttcggggagatttcggggtaaaaaccattactgagattacatggtataatcatgaacgaagtaaaaaactcctaagatcaaattttgataaaatattacacatatttcaggaatttgaaattaaaatctatcttaaataaaaatcgcggcgaaagaatttcgccgcgacttttatttttaatgtaaatcgtcataaattcttacaagatccacaacattttttaccttaagtttttcaaaaatcttttttttgtaagtactgatggtggacattttcagattcagactgttagaaatttcaatatttccgtttccctcggcgagaagtttaaagatctggaattctcttttcgaaagcctttctacagagtgcacatcggtagaatgggtaacgagctttttcatcatatctaccgtgtaataatatccttcttctaatattgattttacactggtaataatctcttcttctgtggctcctttgttaagatatccggctgctccttcttctatgtactgaattccgacattctcgtcgtacccggaaaatataagaattcttaaatgtttctgcttttttttcagttccttcaccattgctttaaaaatactctgtggaatatcaatatcaataattaaaagatcgtatactttttcgcaaactttttctttaacttcaggataagtttcggcaaaatctatggtacactgatatccgagtttggtttctaaaataattgaggttcccattcttacaacataatgaccgtcagcaatgagtatgttcttcatagtgttcgttttaaatcaattttctctacagaaaatcactttttcattcaattttaaaatttcaatacaacttacagaccaatatcatttctttataatatttcttcctgattagaagagttttagagacataatatactattaatataattctgaaatttttcaaacttataattttcatttttttatacagccgttaaaaaaacatgaaatctttaaaaggtaaggataaaagtatattacaagcacacatctccacgtaacattgtaaagaattttatacaaaaataagacatataatattcacaaacaggtagaattaatactataaaattttcttaatattatttaaaattttcttaaaaataaaaaattacagatttaaaaacctgcattataagattttacagataatttaacttccttagattatcctattattttagcaaattccttctttcgggatatttacggtctgattatttattttttttgtgatcattcaaattttacaaaaatttattttacaattttcgaataataatgaattttatacacataaaaagacagaccttaaaagatctgtcttatgaaatatatttttttgtttttctactctacattaagtactttctctatttccggagcatactgtttaatggtattttcaacgcctaattttaaggttgaaaaatttagtgaacatccggaacagttgcctaaaagctttacatagacctgattatctttcacatcgataagctcgatatcgcccccatctttgttcaggaacggacgtatgctttccagagcctccaaaactcttgttacggtatcttcgtgtgttatatttgtttccatatttttttcagttcagttctgtttttcagattttttgaaaaatcattattttgcttttggtgagcagccagccattgttgtaatctttaccgcttctgtagggggaaggtttttatttctttccacaaggctttcaaccatttttcgggcagtttctgtatagatttcggcaattttagatccttcctgtaaagcagccggtcttccgacatctcctgcttctctgatgctctggattaaaggaatttctcctaaaaccggaattccaagatcatctgccaaatattgcgctccctgttgtccgaaaatataatatttgttatccggcaattcttccggcgtaaagtacgccatattttcgattaatccgagaaccggaatattgatgctttccatctggaacattgcaatcccttttcttacgtctgccaaagcaacgtgttgaggggtacttacgattacggctcccgttacaggaacttcctgaataatagataaatgaatatctcctgttcccggaggaagatcaataagtaagaaatccagttctccccaagctgcatcgcggatcatttggttcaatgcctttgaagccatcggacctctccagacaactgcctgattggctcctgaaaaatatcctatcgaaagcattttaacgccataattttcaataggcttcatgagattctttccgccaatttctacagaaattggtttttcgccttctgtatcgaacatcgtaggaactgaaggaccataaatatctgcgtctaacaatcctactttaaagcccatttttgccaatgttaccgccatattcgctgcaacagtagatttaccaactcctccttttccggaagcaatggcaataatattctgaattcccggaatttgctttcctttgatttggctctgctgaatttcgctcggctccggagaaacgatctttagtttcagattgatctcttcaccgaattcacttgcaaaagcctgcttcattgctgcttcaagcttctttttttcgtgcattgctggtgaatgtgccgtcatatcaatatatacatcgttgcccatgatttgtaggttattcaccaaatcgtcaacttctatctctttaaggaaatcctgaaccttttctttcgtcaacataaactaaataaattgtttacaaatttacgtaatttttagctatttagaataagtaaagagactgatagatattttcttttgagaaaaaaaatttagtaaaagcaagcttattaaaaataaatcatttcccttcatttaatcataaaaaggtttcataagtccttattaattcggcgcaaagtatatttcctcattattaatgaaattttgttagatttgttgaaatctatatcaagtaaaaattacatcaccaaaccaatgaactctaaaaaattcatcttccttttttttctcacttccctttgtatcaaagcccagaattattcgcagtatgtgaatccgtttataggaaccggcggtcatggccacacttttccgggagctattgttcctttcgggatggttcagctttctcccgatacaagaatcgacggaagctgggacggctgcagcggctatcattattccgactctgtgatctacggattttcgcacacccacctcaacggaaccggggtttcggattatggtgatattatgctgatgcctactatgggaaaaccgggtttaacacctaaagaatattcatccagattttctcataaaaacgaaaaagcatccgcaggattctattctgctaaattagacaaacacaatattgatgttcgtttaaccacaacaaaaagagtcggctaccacgaatacaccttcaacaatgcaggagatgcaaatattattttagatctgaatcacagagataaactgctggaaggcgaagtaaaaatcattgatgataaaacgattgaagttttccgcagaagtgaagcgtgggcaaccaatcagtacatttatgcaagaattgagttttctaaaccactgaaaatttcaaaagaatttttaaccggtgaaaaaaccgaagggattagtgaaggcaaaaagaaggtttcatttaatggaaataaattagctttagctttttcaacgcaagttaagaaaggcgaaaaaattcttgtaaaagtttcaatttctcctacaggatatgaaggagcagcaaaaaatatgttggctgaaggaaaatctaatgactttacagctattgagaaacaggctgttgcagactggaacaaagagttatctaaaattgaggttaaatcttccgacaaaaataaacttgccattttctacactgcaatgtatcatgtgttcacacaacccaacatcaatatggatgttgacggaaaatacagagggcgcgataacaaattctacatggcaaacggattcgattattattcggtgttctcgctttgggatactttcagaggagcgcatcctttgatgactttaatcgacagaaaaagaaccgcagatttcatcaatacctttattaagcaatacgaacagggcggaaagcttccggtttgggaactcgcgtctaacgaaacggaatgcatgatcggttaccacgcagtttccgttattgcagatgcgatggcaaaaggaattacaggtttcgattatgaaaaagcatttcaggcttctaaaaattctgccatgctggatatttttgggttaaatgcctacaaacagaataatttcatcagcattgatgatgagcatgaaagtgtttccaaaaccgtagaatatgcttacgacgactggtgtattgcccaaatggctaaaattttaggcaaaaaagaagactatcagtatttcatgaaacgttcccagaactggaaaaacctttacaatccaaagaacggattcatgcagccaagaaaaaacggaaactggtacgaaccttttgagccaagagaggttaacaataattacacggaagggaattcatggcattactcctactctgttcagcaggatattccgggactgatcgcggcgcatggcggaaaagagaaatttgaacagtttattgatggtattttctctgcaccggacaaaacaacgggaagagaacaggtggatattaccggattaatcggacaatatgcacagggaaatgaaccgagccaccacatcgcatatctttataattatgtgggaaagcctgagaaaacagatgcaaaaattaaattcatccttgataattattacaaaaacacaccggacggactaatcggaaatgaagactgcggacagatgagcgcatggtatattctgagcgcgatgggaatttactctgtaactcccggattaccggaatggcagacgacgaagccttattttgatgaggttaaaattcatctggaagacggaacaacgagaattattactcccaatacaaacagagaagagcttaaaaaaattggttttgaaaatgcaaaatcatttaaagattttaaatatgatgaattaacggcatctccggttatttctgcatcaagaattttcgacctgaatacaaaggttgagatcacagcgctaaacccggatgataaaatttattatatgacactggatgaaggtgatgcaaacgtaagaaaaatgtttaccgcttataaaggtcctatcaccattactaaaaccactcaggttgcagcatatgcggaaagaaatggtgaaaaaagttcaattataagagccaatttcaacagaagaccgaataactgggacattacagtaaactcaacacctactccacaatacacagcaagcggaaaattatcgttaatcgacggaatcaacggtgatgccaactggagaaaaggtgaatggctgggttatcagggacagacttttgaagcagttatcgatatgaaatcacctcaacaattcactcacctatcatcaacctatcttcaggacagccgtgcctggattttaatgcctaaaaaagtggaatattatgtttccaacaacggaaaagattttattttactaaaaacggttgaaaatactctggatccgaaagatgaaatcgttcaggtaaaagacttttcaacagaagttcttcctacacaggcgcgatacgtaaaagtaaaagcctatcatttcgggaaacttcctgagtggcatcagggagccggcggagatgcttatatttttgtggatgagatttctgtgaaataatttttaaaatttactctaaataataaacctctttcggcttgaaagaggttttgtttttttaatcttgctgattagcaaattttgctgatctttttaatacaaacatctgcaaaatctgtgtaatctgcgggaaaaaaaagattctccgcttcgttctgaataaaaactttgtagttaaaaattaattcattctttccgaccagttcagttctgaaggcagttccatatcagaaaattcaatgtggatcactcttctttttttgccgttcatcgttcggttggagccatggagaattaaaggtttcatgatcataactccgcctttttctacattgcagatagtttcagtttctaggttccagtcgatggtttccggtctgtaaattcctttggcgtgggatttcgggatcactttcagggctccattgttttcatccgtatcatcgagatgaattcttatggtgaaaatattttccaaaatattcaaaggcggctgaacggcaaactgattttgtttcgttgtccatggtccgaaattttccaattccagctttttatccaccgaaatcgttaaatcctgatgatacgcaacgtaccagtttgatttttcaggtttatcgaaataaatgcttttcacaacaaagtatttttcgccgaaaatttctttgatgattgttttaatcttatcattaaaaatcaaatcttttacttccggaatttcctttaaaaactgtcggatggcaaatagatcttccgactttctgaaagtttctttagaagtatctatatcttgaataacctcaatgatcttttcaatttcttcataggaaaaaatatggtcgataacggtaaagccgttttctgtaattgagtttttatggttttctaaattcattttagttaaatatattaattacgcattatcattctcatcgaagcgcagcggagtgaagaatctttttctaaacgctaagatcgcgaagtttttatttaataggattgaaaatatttttcggtcgcgatggcgtttcactcagcaaatgatagctgtatcattctaatttttatcattgataatttttgaattaaattttttttaaatggagctgtcattctgatcgaagtatagcggagtgaagaatctatttcttaaaacaaagatcgcgaagattttatttataaggattgaaaatatttttcggtcgcgatggcgtttcactcagcaaatgatagcactatcattctaatttttatcattgataatttttgaattaaatttctttaaagggaactgtcattctgatcgaagcgcagcggagtgaagaatctttttcttaaaacaaagatcgcgaagattttatttataaagattgaaaatattcttcggtcgcgatggcgttgcactcagcaaatgataaaagtatcattctaatttttatcattgataatttttgaattaaatttctttaaatggagctgtcattctcatcgaagcgcagcggagtgaagaatcttttttataaacgctaagattgcaaagattatatttaaaaggattgaaaatattttttgttcgcaatggcgtttcacttagcaaatgatagcagtatcattctaatttttatcattgctaattttttgaactaaatttctttaaatggagctgtcattctgatcgaagcgcagcggagtgaagaatctatttcttaaaacaaagatcgcaaagattttatttaatcggattgaaaatatttttcggtcgcgatggcgtttcactcagcaaatgatagcaagataacgaatccttttccgtttataaatatctcaatttcctaaaaaataaatggtcaataatgaaaattaaaaattcattattgaccattcacagcctaagcttgatttttataagatatgaatcgtcaatggtgaattcgcttggttatgaatcttcactaataatgaataattcaaatttcacaaacgaagtgaaattgacttttcacttattaattacagatttccgccatgattttccagctgtccttcccacttagaaaccgctgaggttgccaaagcatttccaagaacgttggtcatacttcttcccatatcacagaaatggtcgattggcagaattaaggcaattccttccggcggaataccgaacatggaacaggttgctacaataattactaaagaagctcttggaactcccgcgattccttttgaagttaacatcaataccagaagcattgtaatctgttgtcctaccgtcatttcaattccatagatctgagcgatgaaaattgaggcaaacgtcatgtacatcatgcttccgtccagattgaaagagtagcctaatggtaaaataaacgataccactctgttgttacagccaaatctttccaattcttccaccagtttcgggaaaacggcttccgaacttgtcgtggaaaaagcaatcagcaatggttcttttattctttttaacaattcgaaaagacggttgcctaaaattaaatatcctaccagtaaaagcacgagccaaagtacgcctaaagcgaagaaaaaatctcttaaataaatggcatagactttaaaaatctcaaaaccattggtcgcgactaccgcagcaatagcacctaaaactccaagcggcgcaaaccacatgatgtatcctaccattttcaggattccgtgtgctataatgtcgaataatttaatgacaggctgagaatattcttcgcctaaattcgcaagagcaattccgaacatgatggaaaataccacgatctgtaatacttcattggttgcaaaagcttcaaaaatacttttaggaataatatgctttacaaagtcttccatagaaaagcctttgctggttttcaatagttcttctgcggaagcagcatcctgaatcggaagtttggttacgtgtcccggttcaagccagttcacaagcattaatccaatgaacagtgaaattaatgaagcagaaataaaccataacatggcttttgtccctactcttccgatcattttaatatcgctcattttggcaattcccaccaccagagttgtgaaaaccaacggagcaataatcatctgaacaaggcggatgaaaaccgttcccagcagttttatatttttagaaaaagattctgcactttccggagcctgtgtatgcacaactccgccgattcccacaccgataatcagtgcgatgataattgctataaaaagtttattttgtcctttcatatatatgtttcaagattcgcaaatataatatttttacaattggcggaaagatttcattttccccagagataatattatgttaaattaaacgtgatttaaaattaattatctgattaataaaatattgtataaaaatttacaaaaatttatttgaattttatccttttggtacaaattttattattacatttacttgtattaacaacataaaaaaatatacaactatgaaaaaaacgatcgcaatggctgcattagctatagctgtatctttcggagctgtttcttgtaaaaagaaagtttctgatgccgatcttcaaacgcaggctactacggtagtaacagcaaatcctagtgcttctgtagaggtgaaggacggcgttgcacacctgagcggaactttcgaaactcaggaggcaaaagatgcaatgattaagcaactgaaagccattaccggtgttaaagaagtaatggatatggcgactgtagctcctgctgtaactgctgtagctccggtggaaactaaaagcgcagtagatccgatggtacagcaaaaagtacaggatgctgtaaaagatatcccgggagtaaaagttgaagtcgtaaacggagaacttactcttacaggaagcgtatcttctgctgatgcaagaaaagtaaaagaatctgttgatgctttgaaagtgggtaaagtaaattataagtatactgtaaaataatccggagatgagcacattacaagataaatattcaagtgtagtttctgcagctcagtctgccggaatttctaaccttcaggttcaggaacaggacggaattctttacgtttcaggaagtgcttccaacacagcagcgaaagatgcggtttggaatgctttaggagcaattgattctacgtattctgcttcagacatcaatattgatgtacaggtttcaggtttggcagcaggtgcagctcttacggttgcaacggacgaatctaatctgaacatcagacaggaaccttccacggatgcggctgttgtaggtaaagcagcaaaaggttcttctgtaactttggttgagcagacatcagatgactggtggaaagtaaaaactgaagacggacaggaaggttatgcttattcaagatatttgagagcttaattgtaaagatttaacattatttaaaataggaacatcccttttcggggatgtttttttatattttagcgcgttcaaaaacattcaatgaagaaaatcttatggttgctgcttttttcgtttagctttctaatgctgaacggacaaaagtacgtcattaaaggaaaaattacagattttgaaaaaaaacctgtggagaatgcaaccatttatcttttaaaacagaaagactcttcattagtagattatacaacttctaacagggaaggtctgtttgcaataaaaaccaaagaacttgatgaacctacaattctacagattgatgctgaaaaattaatttcttactcaacaaaattcgataccattgataaatctattaatctgggagacatccagttggataaaaatcagattacggatattgaagaggttaaaattacggtttcgccgattaaaattaaaaaagatacggttgaatacaacgcgaaagctatcaaagttcgtcccgacagtaatattgaagaactactcaaaaatattgacggcgtggagatcgacaacaatggaaaaattaccgtcaacggaaaagaagctgaccagatcatggtgaacggaaagccttttttcgataaagacggaaaaattgcgttaaaaaatcttcccgccgatattattaaaaacattcagattaccaccaccaaaaccaaagaagaggaacttacgggaaaaacgcctaaatcgcagaacaaaaccattaatttcaatattgatgagaagaaaaataaaggatgggtttcgagaatttctacgggttacggttcggataaacggtatgacgaaaaaggactgattaattatttcaaggataaaaccaagatcagtttgctgggttataccaataatatcaattcgcagggtgtttcgatggaggatgacaatggtaaaaattccaagttgggaattcagaaatcttcgatgatcggggtgaattacagtgataaactgggcaaggaagtcgaaattgaggaactgggaatcaaacgaaacgcaaccaatcttgaaatggcatcaaaagtttctaaaaccacttttcttcccgattccaacttaaaaacagactcagaaaaccaagttgaaaatgacaaagagcaatacacgctgaattctacgctgcgaataaagccggacacaatcagtacgatttctttttcgccgtcgttttcttttacaaaatcaaataatttcagaacgggaaattcagcgacttttaaaaacgatgaacttttaaataaaagccagtcttctaccgtaacggattctgaaaacaacagtttctcacctaatcttcattacgcaagaaaattcagaaagaaaaaccgaagcttttatgccgatttaattacttcgattcagcagaataaaaacaataacctcatcaattccggtactttattttttgaaaacggagtggaaaatgttgcgaaaagagatgtaagaaatcagctcagtcagagtaaaaatcagaataacaattattcatttaatgcaaaatatacggagcctgtttcggattctgcaagtgtgacgatcagtatggagtataattcgagaaatgccatgaatgaaagaatcgtaaatgattttgatgccacaacaggaaaatatacggtgtacaatctggctttatccaaccgttcggatgaaaaaaacaatcagctttcgccggagatcagttttaatttagataaaaaaatgctgaaaatgtggacttctttaggtttaaatcttacggatctgaactatcattccactttcaacggacaaaattatgagcttcagagaaattttgcgcttccgaaatacaatttcggactgatttacaacttcagccagacttccaatgtaagtattaccaatgtatcctatttcaccctcccatcttccgcaaacctgattccttatgtagatgaatccaatcctctggtaacgtataaaggaaatcctgatttgaaaaactcatggatgaattctacgaatgtttatttcaacaattataatattcagaaaaatttaaactattactttaattttagtttcgtttacaataacaataacacaaccaattattcatattacgatgattccggaaagcagtttgtgacttacgcgaacatcagcggaaataaaaacgtcaatttcatcgcaggtttaggaaaaacgtataaatgggaagatcataaactgaatgtaagaccaagatcaggatttagttacagttttaacagaggttttatcaacggacagcaattcacaggtaattcttacaatttcagtccgggaatcaatgttacgtacgaaaagaaggataaaattaccattaaaccatcttacagcatcaattataatttttctgaatataaaaattacagcattgaaagcatcaaaaatacgtctcagaatttcaggttggaactcaccaattatttcttccagactaatcttgttttcgaaaatgattttgaatataatacgagttcgaatatcgcaccgggtttcaagagggatttttactttttaaattcaagtgtaagttatactttttttaaaaaacagcttactgcgcgtgtaaaagtgtatgatgttctcaaccaaaaccaaagtgttaccagaacgatttccgcttccggcgttgaagaccgggaagatttgatattgaaaagatatgtgatgttttctctggtgatgaaactgaataaatttggagggaagaagaaataattttatttgattttttttaacttatataatctttttttgattgtccgtttattaacctaaagcttcgacaggctcagcttgacatcgctagaaatcaagcgtttattattagaggtgtcacactgagcttgtcgaagtgcctgttataaataattgattttcacatcaatgcatagtaatagattgtttaacggatattcaaaatcttttttccatttaagtattaaacataaaaaaccaaagtgtttaaatcttttgcattttttgttgtgaagtttaaaataaaagatccataaaataatatttaatttagactcttccttcgtcagaatgacaacctgttgttaaaactttatgctaaaaaccattttatgattaaattagctgcaaattttaaacaatgaagattcacttttcgattttgtttgtttttctgtttgtttttggaaattctcagactaaacagcaacccgatacttttgtaaaggacaattttattaaaaaggaaatgtatatcccgatgcgtgatggcgtaaaactgtttacttcggtgtacattccaaaggatatttccaacaaaaacaaatatccgtttctgatgcagagaacctgctacagcgttgctccttatggtgaaaacgagtacagaaccaaactgggaccgaaccaatatctgatgaaagacaaatatatctttgtgtttcaggatgttcgcggaagatacatgagtgaaggaacgttcaccaatatgacgccacaggtggatcataaaacgaaaaaagacgttgatgaaagtaccgatacctacgatacaattgattggttattgaaaaacatcaaagacaataacggaaaggtaggacaatacggaacttcttatcccggattttataccgcagtcggaattttagctgaacatcctgctttggtagcttcttctccacaggcgccgatttcagatttctggaatgacgattttcttcacaacggaagatttatgatgggctatttcagaaccttccctgtttttggcgttcagaaaacaaagcctgaaaataaagcgtggtattctgattctatgattaaagcgacttctgaagacggtctgaaattttacagagacatgggaaccttaaaagacggttatgaaaaatactacaaggataatttcttcatgacggaaataatgaatcatacgaattacgatgaattctggcagaaaagaagtctattgcctcatcttaaaaacgtaaatcatgcggtaatgactgtgggaggatggtttgatgcggaagatctttcaggacctttaaatatttataaaaccattgaaaaaacaagtccgaaagcgaaaaacacaattgtaatgggacctttttctcacggagcctgggcgtatgaacagggaaaacatttccacaaccaggtttatttcggagacagcattgcaacgtattaccagaagaatgtggaaacaaaattcttcaatcattatctgaaaggaaatacaaaacaggatgcaggtttaccggaagcattgatgtacgacaccggtgcaaaacaatggagagagtttgcaacctatccgccaaaagaagcacagaaagtgaatttttatttatcgaaaggaactttgaaaaacacagcgggacaaggttcttcagaatactacagcgatccgaataatccggttttaagctctgataatttaagagatttcaacggcttcactccgaaaaattatatgtccgaagaccagagatttgcagaaggaagacctgatgttttaacgtttacaacggatgttctgacggatgacattacgtttgcgggagaaattatggctaaattaaacattgcttccacttctacggatgcagattttgcggtaaaattaattgatgtttatcctgaagattttaaacctgctgagaaaaaagacggggtaatctatggaaattatcatcagatggtaagaagtgaaattatgcctgcaagattcagaaattcgagagaaaaagcggaagctttggttccgaaccagaaaacagcggtgaatttcagattgcaggatgtggtgcatacttttaaaaagggacataaaatccagatccagatttcttcaacttggttcccgctttttgcgatcaacccgcagaagtttatggaaaacccgaattttgcaacgaaggaggattacacgaaagcgtttatcaaagtttttgatgacagtgcgattgaagttgaagttttgaaataaatttaaaagctgttcggttggaacagctttttttatgtttttattttctcgtggattgtgtagattgtgcagatttttttaactcaatcatctgctcaatttgcgggagataattatccatccaatttgtcatcctgaaaggatctcaacgatatattgaaaactttgtttagatgctttcagcatgacagacatgctgtaaataagtcaccatttaattgttctgaatggtatttattttttggtttctcgcagattgtgcagattttcccacttaatcatctgctgaatttgcttaatctgcgggagataattatccatccaatttgtcatgttgaaaggatttcaacgatacattgaaaactttgtttagatgctttcagcatgacaaactaaacgctaaaaatttttatacaaaaaatcattctgcaatcgtacggaacgtaagattcactcgcggtgtttttacttttgtggttggaggaagccggtgcagccaattgtcctgcgttgttcctttcatcaccaacaagcttccgctttccagaaatatttcggctttttcttttgttgttttatgtttaaataagaactttctttccgctccgaaagtcagggaagcaatggctccgtgtttttttaaatctttttcggcatcgctgtgatacgccattccttcgcttccgtcgtggtataaattcagaaggcaggaattataggtttcgtctgtaatttcttcacattttttctttaattccaataattcgggcgtccagaattttgcatatttcgtccgttttgaataggtgtattcaaaaggtttttcaccgaaccaggctacttttcttttggtcaaaattaattttccgaaaataacggcttcatcattttcccacggaatttcgttaaacagataatcgaaataaaaatcagctttttctttggagaacacttttccgtaataatgaacggttccgtctttgggaaggatatttaaaggataatctgatacgtcttcgaataaactcatcatgaaatttaatgttttgtgattaatgtttcaagttctttgtcattccgtaggaatctaagctaagtatttttaaattttaacctctaataaatgatcctattgattttttattaaaataagttttaggctaaagccaatttggtcaattgattattttaaacgggctaaagcccgtttctattgatggaatagttttatttttaaaattttaatcaaaattattaactattcgtaaaaaattagtgcaatttgtgtttgaaatcaagagtaaatttttgaactttcccagccgataataagttgttttctctcgcttccccacatataaccgccgatttttccggttgactgaattactctgtgacacggaatcaaaaaagcaacaggattgctgccaatcgcggttccgacagctcttgaagcatttggatttccaattttatccgccagatttccataggttgataatttccccatcggaatagtgagcaggctttcccagaccttcaactgaaaatcggttccttttaaatggagctttatagtgttcagttccgtccagtctttactgaaaatagaaagggcattgttctgaaaatcatctttcctttcaaaaaaagaagcattgggaaatttagcctgtaaatctcccaatgctttatgatgatcggtttcaaaagccatgtagcagattcctttttctgtggaagctgcaattacttttccaaaaggactttcggaaaaactgtaattgatgttgaggctttttcctccgtttttatattctgccggagacattccttcgattttcacaaacagatcgtgcagcctgcttgtacttgataatcctgtctcgtaagccgtatcaaataaactcgctttttcttccttcagcaaacttttggcatgttccagactgatgaactgcaaaaatttcttcggacttgttcctgcccagtcagaaaacattttctgaaaatgagccggactcaaatgaattttctccgccacttcctccagacttggctgaagcttaaaattgctccggatatagtctatcgctttggcaattctttcgtaatctatctgattctgtgtagacataacattgaatttacctcacaaatttccaaagaatctacggcagaaaaaatccgtttcctgcggaatttagttgttgttatagatatgatagtaagcaagcattttgtaatataacttcgccgccaagaacgcgcttggttttgccatcggagaatccattaattctacaatatcaaaagcgacaacgttacatttttcgaatacttttcttaataattccaaagtaggataccactgtaaacctcccggttccggagttcctgttgatggacaaagcgatggatcgaaagcatcaagatcaatcgtgatgtacacatttcctgaaactttttccaaaacgtcgtttacccagttttcgttgttggcaatttcatgagcgaaaaatactcttccttccggtaaatattcaacctcttccacatccatagaacggattcccacctgtaccagattatgcttctgattggcttcaaaaaccgcacatgcgtggttggaagtagaaccgtggaattccggacgaagatctgtgtgagcgtccaactgaagaacggttaaattctcaaacttctctcctaccgcacgaatcgaaccgatagaaacagagtgttctcctccgaaaagggtgaatagttttccgtcattattcaaaagctcttttgttttcttgtaaacggcttctgtcatggcttccggtgaagagttttcagaaacttctcctgctaaatatactccttctaaatatggttctgtctgggtttcgatgtcatacagctccatgttttcggaagcatcaaggaataattcaggacctttatcagctccttttccccacgttgaagttccgtcgtaaggaacagtcaccaacattactttcgagttttctaacgatgcatttttctctggaattcctgcgtatgttttcatgttttatgtaaaaattaaatgatttcggcaaagatacaaagaagtttggagaagttggcgggtgatgaatggaacaacttcatgaagtcatctgataaattttaaagtatgataaatataattcgcagattataatgtcgacacgagtaattcccgaatatccactttcaaaaatttcgagatttcataaagggtttcaacagaaggctgaacttcattcgtacaccagcgagaaactgttgactcggtttttcccaaatgacgggctaactctttactggttttgtttttttcaaccagaacagattttattctatttaagttcactttcgacacaatgataatttattgacttctcctgcaaatatcgttaaaatttaaacacttgaaaatcaatataaaaaagcaataaattacattttcacaataatttattttcactaaaatacaatttattatacttttacaataataaacaaccatcatgaaggaagaaaaaaaatttcaaaaaatgggaataagacaattaaaagtgcatcagaagtacattttaagaccgtatcatcggtatgttgtatttcctgaaatccgactttgcggaaaatggcttcaggaaactggtttcaactgtggacaatctgtgcttgtttgtcacaagaaaaataaaattatcatcactctgaataagaaaatgaattctgatcggtaaagaaatgttgataaaatggattgataaaaaaactttaattattgcaaggttaattttttatatttgatatttactatttgttatggcgtattattaaatacttagattatttactatttgattaaactgacttctaaatttagacaatagcattttttatacaaaactttcttgtcgaaactaaaaacattcattaactttgttgcttatagtcaacaatctaaaatgataaaaaaagcaatattgaacaatcttattataaatcaagaccttattagccttgagaagcatttgctgtatcaatatctgatcaacaaaaatcttgattttactaaaagtccaatcttaagagagtactttttagactttgaacaagatacaaatatattttttagtgtttcttgtttagaaattgaatctataaaagagcttgagaaccatttagaacttattattccaaaaaccgacagaaaattaaatggagctttttttacccctgactatattattgattttattataaaagaagttaaaccacaaccaaaagacaaaaacttagatccaagttgtggttgtggagcatttttaattggcttgactgattattataagaatacttttggtaaatctataaaatcaattgttaaagaaaatatatttggttcagatattcttgcttataacatagctagagcaaaactattattgacaatttatgctttacagcataatgaaattttagatgatacagactttaatctatatcaccaagatagtttaaagactgattggaaaatgaattttgatacaattgtaggaaatccaccttatgtaaaatttcaagatctctccaatgaaaatagagattatttagtaaagaattggtcgactgttgaaggaggaacttttaatctttattttgctttttttgaattaggttacaaattgcttaaaccaacaggacgtctaggttatattacacctaacaactattttacttcgcttgcaggcgaatcaattcgtagattttttcatcaaaaaaaatgtatcactcgtattattgactttactcacaaaaaagtatttgatgctcaaacttatacagcattaacttttttaactaagcaagaaaacgatgcaattatttttgacaggctaaaaaatggagtggcaccacaagaatttttaccaacagcaaacggatcgcctaactatttaaaagatttgaacgtaaaaaaatggcgattactaaaatcggaagaacaaaagaatatcaaaataattgaaaccattggaactccaattaataaattatttgatatttgtgtaggtattgctacattaaaagatgatatattttttattgatggtagctgtgaaaaaggaaattatttcataaaaactactgataagggaatttttgaaatagaaaaagaaattactagacctgtatataaaatttctgatttcaaaattcaagctgaagtcgaacagaatacaagaagaattatttgtccttataatataaagggaaaaacagcagctccaattcctgaattggagtttaaagaacgttttccaaaatgttatgattattttctttcagaaaaggaaaatctcttagctagagataaaggtaaagtaaaattcgaaccatttttcgtttggggtagaactcaaggtttggcaaaaacaggaaaaaaaatccttaaccctacatttagccaaacaccaagatttttattaataaatgaagaagaatcttactttacaaatggttatggaacatattttagagaacaagaatatgatacattattttcaaataacacaaatctaatttctaaaattgaaaatattgacgtggtacaaaaaattttgaattcaataataatgcattactatataactaagactagtgtatctattgatggtggttatccatgttatcagaaaaattttattgcaaaattgacaataccagaattttcacaaaaagaaattgacttattgcgctcccttaataataaaatggaaattaatgactttttaattaaaaaatatcaactctcaataccagtagaagagaatctttctttataagttagcaataaatcaggaacgaatttttcccaagaaagttcacttatatcaatgtttgagtctttaggaatcaatcccacttctttcaactcatcacttgtattatatattttggcaggagtttgactgaaatcaacaattaacaaacaaactttttcgtatttgtaaaaattcttttctgttccttttctattattaattgcctggaatgactttatgtatttcagaacagttgcctgattgggtttcttaaaaataatcttattatttttaacttctttgtcatcatattcaggaacggcaatcatgtagacttcacctaaaaccattttaggacaacgatcatgtaaattgattgcttctgaagtggttctttcgtaaagagtatcaaaatttttctgaatactactaatctgacttctcacatttatagagattgttttttccgtgaatttctcaccatactcatctacaacatcttgtaataatccttcttctaaaatttcttccgctttatcaaggttagaaactacacaaacatcttgatttttctgtttacgagaacccgcaagttttaattcaggagttcggcagttcaaagggggaaaaatcaattcatcattaattccagattcaatcaactctaattttaccgcttcatgaatatttaaaatcggacgagaagacctaatgattgcttctttaccctttgctccattttcaattattgaagtttcaattaattctttaaaattatcaatagctttttgtatattcttcaaactcattgtcattaaaaaattcttttagcgttatatttaacgcattagcaatcttctcaatattaataatagaaacatttcgttgtccattttcaatactcgcaatataacttctatctaaatcagctatataagccaaatctttctgagacatttccgctttttctctcagattttttattcgctgacctattttgagttttatatccacaatacaaaaatgagaatatgttgactataaatcaaagactataagtaacatttaaaaattatttgaatttgaatagactataacatagcgagcttctgatcaggaatctgcaaaattgtcatctgtgcttctcaatccaaaacttcgttaagcccaaaatcattatttctcattcctccaaattaaaattccttctaaagaaaccattccaaaatcaatttaataaaacgcaaattcatcaaaattctcatatcttttttatgtaaaaagggttcaataaatctttagtctaaaagatccctaatcacaacaaaaataattcaaaatttaattttattaaaataatttttaactttattaaaataatttttatttttacaaaaagttaagaacatgaaactacccatcgtttgcccaagctgcgaatctgcattacaggtaagccagatgaaatgcaacaactgtgaaaccaccgtcagtggaaattacgagcttccgttatacttacagcttacgcgcgaagagcaggaatttatcctcagcttttttctgtccagcggaagcattaaagaaatggtgaagcaggcaggaaattcttatcctaccatgcgaaacaagatggatgatttaatcgaaaaaattaaaaacctgaagtaatgaactggcaaactctattcaatccgttttctaaattttcggaaaaaactcttttaaccattggttctgttacaggtgtatttttaattatttcctgttactttacccaaacaaaaatggacagtctgctccatttttcttccggcgaaggtttaaatcttgtttcaatcagtctctatgttttaatcagtttagtgtatgcggttttactgcttttcgggctaggaaaaatcctcaataaaagaacaaggctgattgatattgccaatgccgttttggtttcacaaattcctgtactgtttaccgtaatttccaccaaactttttgatattgaaagactttcagaaaaaatatcccaaacatctgcaaaagataagattcctgatattaatattttggatttaatcagtctaacggtttttgcatttgccaacttaattttaatcatttacagttttaccttgcttttcaacggtttcaaaactgcaaccaatattaaaaaatggcagcagatcgtcatttttgcctttgtaactcttttaggaattttaatctgtcaaataattttacctcaattcagcctataacttaaaaaaataacattatgaaaaccaaacttttattggtgctgattatattggcacagactttttacgcccaggaaataacaggaaactggaaaggcgacctcgatattcagggaatgaaactcccactcgttctgcacatcagcaaagacggtgaaaatttaaaatccacagtagacagcccgaaacagggagcaaaagatattcctgtagaccacactacctttgcaaacaacgaacttatttttgaagtaaaagcactttctgtttcttataaaggaattttgaaaaacggaaaaattgaaggaactttccaacagggatcgatgtctcttcctcttactttcgaaactcttatcggggaagaaaaagtaagttttaaccgtccccaaactccaaaacctcctttcgactacaaaacggaagaggtaacttttgtaaatcctgtagataaaaatactttggcaggaaccatttctatacctcaaaactttaaaaaatcggataaaattttagtcatgattacaggttccggaagacaaaaccgggacgaagagctttttgggcataaaccttttgctgtgattgcagattattttgcaaaaaaaggcattgccactttaagaattgacgaccgtggaattggtggttcaagtcagggaaaagatgatgacacaactgctaactttgcaacagacatttctacagcggtcgattttcttgcagcaaaaggatatctgaacataggcttgatcggacattccgaaggagggatgattgcgccgatcgtagcaaaaatgaacaacaaagtgaaatttttagtgttaatggctgctccgggaactaaaattgacgaattactgattcagcagaattatctgggcggcaaactcgcaggaatgactgaaaaagatttagctgaagccaatgtaatgaataaaaagatttatgactttattaaaagttacagcggaacaacctatgaagaagatatgaaaaaatttatgactgaaaattttcagggtaaaatgagtaaggaagagctgacacaaaccatcagccagaccaagaaaaactggttcagatattttataaaattcaatcctgacgaatatctttcaaccataaaaattcctgttctcgcgctgaacggaagtctggattttcaggttccggcgaaagaaaatctggaagccattaaaaaatcgctgacgaaagcaggaaacaaaaatttcagaacggaggaaattaccggattgaatcatttgtttcaggaagctacaaccggagcattttcagaatattcggaaattgagcagacgatttccccaaaagtgctagctgaaatggcagactggatcgcgaaatttaaaaagtaatcgaaaaatatttgcttcaatcctgaaacgtttattattttagtaaaaaaattcagatatgcctttaaaagctgtgctgttcgatatggatggcgtgattgtggatacggaacctctgcacagaaaagcctattttaaaacttttaatgatcttggaatcgatgtttcggaagaattatacgcttcatttaccggagcttctaccaaaagagtctgcgaaactctgattcgggaatttaatttaaaacagacgtacgaggaaattgcaaaaaccaaaagagattattttaaggaatacttttataatgatgaagagtttgacctgatttcaggcgtaagagaactgatccagcattattacgacaacgggatcagactgattctcgcttcttccgcaacgatggcaaccatcaatatggtttttgaaaaatttgagcttgaacaatattttggaggaaagataagcggagccgacctgaaggaatccaaacctcatcctgaagtttttcttcttgccgcagaaatggcgaataaacctgtagaaaactgtatggtgattgaagattccacgaacggaattttagcctcacatcgggcaaatattttctgtgctgcgtacagaagtccgcattctaaaaatcaggattatacgttggcaaatattgtggtttcggattatgcagaactggaactagataagatttcaaaatatttttaaatagaaaaagctctcagatattgagagcttttgtttattattaaacaccaattgcacgaatagttttcacaaacttcacaattattacttgtgtttttagtgcaaaaatttgtgctgtttgtgtttaaacaattatttgtaacccaaaagtttcagtacatcttccggctcctgtttttcacggaaaatttcatactgcaactcaccgttttcgtctttctgaatcaaaacgtgtctcggctgtggcattaagcagtgatgaactccgccatatcctccaatggtttcctgatacgctcctgtgtggaaaaatccgatgtacagaggtttcgtatcactgaaaacaggcaggtaaatcgcgttggtatgctgttcagaattataataatcatctgaatcacaagttaatccacccaagaaaactctttcatacgtatcttcccatctgttcagcggaagcatgataaagtgtctggaaattgcccatgtatcgggaagcgtcgtcatgaaagaagaatcgatcatattccatttttctctgtcgttctgacgtttctgggaaatgattttataaatattggctccgctttcaccaacggtaaaacttccgaattctgtatagatattcggttcttccactccttcctcttcacagaattttttgatctgagaaacgatctcttccaccatgtactgataatcgtaatcgaactgcaacgacgttttgatcgggaaacctccaccaatgttcagcgagttgacttcgggagcaattttcttcaaacgcgcgtatacacgaagacatttatacaattcgttccagtaatacgctgtgtctttgattccggtattgatgaagaaatgaagcattttcagtctcgcattcggatgctctgcaattttctggctgtaataaggaatgatgtctttgtacccgattcctaatcttgaggtataaaattcgaacttcggttcttcctcagaagcgattctgatcccgatatcgaaagtggtatcaatgctttctgtaagtttatccagctcacggtaattatctaaaataggggtaatattttcaaaaccgctgttaatcatctccgaaattttcgccagataatcgtctgttttgaaaccgttgcagattacttctatatctttcgttacttttccttctttgtaaagagattttacgatatccatgtcataggctgaagaagtttctatagaaatgtcgtttcttaaagcctcttccaatacaaatttaaaatgactggattttgtacaatagcaatatctataattctttttataatcggttttctcaaaggcttccctgaaccagcttttggccttctggatattttgagaaattctcggcaggtagctaatttttagcggggtgccaaatttttcaacaacatccattaaaggaatgtcgtgaaacaacaaattgttctcagaaacattgaattcctcggtagggaaatacaacgtctgatcaataagttccgagtactttattttcatttctaaacaagtgaattaagaatgcaaaattgctaaaaaagtttggttttttagcgttaaaattattataaattttaatggattttattgaagaaaataaagctaaattatcaatatgtaaacttgagaatatattcctgccttttattttcagaaatttttaaaacctcttgaatatatcggtctatagaaccgtatttgttgttaatttcattaaaagcggcatccagataagcggtttctatccagcttaatttctccagaactttaatatccattttcggatagagaaaatgcaggttatgggcgagatgaagtcttttatcgattaattttttcctataattattggataaaagataatcgttgtaaatggtttctttatcgaattttaaaatcgtaagaatgagagcggtggtgattccggttctgtctttccctgcggtgcagtgatataaaaccggctgatctgattctaaaatttctgtgataatttttcttatgatttctgggttttccgtgacgtagtctttataaaagtcatgcattcttttgtctgcatctgcaccgctgacttttccttttaaaaccaatttctttgcctgatccaactgatcgcctttatcttcaaacgctgaataatttttgtaaacaattccttccggaagatggtcgggcttttttgcaatttcctttgaattccgaagatcgataatttttctgatgcctaaattttcaagttgtttaaaagaagaatttttcagtttatataaatttccgcttctgtatagttttccttctttcagtgttcttccatcgatattttttatacttccaaccgttctgaaattgttgacttttttaatctgaatatcttttccagcttctctttttccaaattcgggtgtggaaaattgctgtgtcttgcaggagaaaacacagagtaatgtgatggttagtaatgatattttgatgaggtttttcatttttattttctcacatatttcacgaatctacaccgatgttcgtgtttgatattttatgttttggctaaagccagttgatgttttttaattttgaaaacgggctaaagcccgttcctattgatgcggataactttattatttatttttataaaatcaagctcgtgcaatttgtgaaaacattagcaataagaaaattgagcaaagtcctttcctattgattctattagttcattatttattcttaattgcaaaaataaatttgtgcaatttgtgaaaataattcgtgcaattagtgtttaaactacaaatagtttttcccaacaaacaaaagcaaatctcctttttcgtattcaatggaaacttcatcttccacagcaaaatttctcgttccgattctggaagtaatatccaaatttccattagttaaagcccaattaagacctttggttgtaatattttcaactgacggaaacggataaagggatatcattttgtctttcactcctgttataacaaattgtttcgggataaaataatattctgaaaattcatcatagaattttatatcgaattgatctttaaaaccaaaagccacggtcaaatttccgagaaaatgatcctgctctcctccacttcctccgaaaacatctactttcttaagatctttttctgcaataatttccaaagctttctgaaaatccgttttatcctgatcgggcgtgtaaatgaatttgtcttcatacatattttcatccgaaccggaatgcgaatcaaaatcaccggaaataaaatccagcttatctaaaggaaaatccaggttttttagataatgaaaagcaccgtctgtacaggcaatgaggctgtattcttcaatgttgggaaaagatttgggaggatctccgttgatgaaaagcagtactttatctttcattcgggttccagtattcttccggttcgttgttgatttttgaaatgtatcttgccagaacaaaaagatagtcggaaagtctgttgagatatttaataagttccggacgcacttcttccgattcgtttaagaataccaaagaacgttctgctcttctgcagattgtacgtgctgcatgtaaaaatgttgcagcttttccgcctccgggaaggataaaatactgaagcggttcacatttttcgtcaaaagcatccatccagttttcgagttcttcgatttcagcatctgaaataattaaaggaagtcgcgattttccgtttgccaacatgagtttatccaccggagttgccgcttcggaacctacagtaaataaatcgaactggatttttttcaactggcttaacacttcttcatcttcaatatggcttttggcgattccgatgaaggaattcagctcgtctatatttccgtaactgtcgactcttgcacttgcttttgaaactcttgttccgccgtacaaagcggtctgacctttatctcctgtttttgtataaattttcataggactaaattagttttttaaaattaggtttacaaattttgagtttaaggaactttacatttgtgattccggctgcgacctagcccagattgcagcatttgtttgagctcattcacaaagtttcggctgcggcggcaaagccgtagtcatggtcggaagatttttttattattttgaacaatgtttttttttaatttaactatatgattttcaattaattgaattgttgttttggtttttatttcatatatttataactgataattaacnnnnnnnnnnnnnnnnnnnnnnnnnnnnnnnnnnnnnnnnnnnnnnnnnnnnnnnnnnnnnnnnnnnnnnnnnnnnnnnnnnnnnnnnnnnnnnnnnnnntctatcaatagattttcgtcaaaaagcatatctttgtttttcatgaggtgttttagtatttgttcaattctaaaatattaattttagacattaagcacctcatgtttttctccgaattcacgttatgttatgattctccggatcatgaagcgtattttccaaagggtacagaagcatttattaaaaaagttgaaaatcttattacactcgaatccgtcaaagtaaaaaagcgtgaaaaaaaccttaccgcaatgctcaattttaccgttgaaaaggatggaagccttatagaaatctgggcttcaggatcaaacaacagctttaatgcagctctggaaaaagccgtaaaacatgttcagggaaaatggattccggcacaacagaatggttatctcgtaagaagtaagattcagattcctgtaagcataaatctcaaataattttacaaagaacagaaaactatccgccaatcattttcttaatcgcattcagcttcatcaacgcttcaatgggagttaatgtattgatgtcgatttttgttaattcttctttgatgctttccagaaccggatcgtctaactgaaagaaagaaagttggatattttcttccgtaacgcgcttgatcttttcagaagaacctccgctttgggaacggcttgcttccagcgttttcagaatttcattggctctgtttacgactttggaaggcattcccgccagttttgccacatgaataccgaaactgtgttcacttcctcccggaaccagctttcttaaaaagatgatatttcctttattctcctgaatagaaacgtggaaatttttcacgcgctcaaaacttacggtcatttcattcagctcgtgataatgcgttgcaaacaacgtttttgcctgagtcggatgctgatgaagatattccgcaatcgcccatgcaatcgaaactccatcataggtagaagttccgcgcccgatttcgtcgagtaaaattaaacttctctcggaaatattattcagaatattcgcagcctcgttcatttccaccatgaaagttgattctcctgcagaaatattatccgttgcgccaactcttgtaaaaattttatccaaaaccccgatttccgcatgttttgccggaacaaaactccctatttgcgccaaaaggcaaacaattgccgtctgtctaagaattgctgacttacccgccatgtttggtccggttaccatgatgatctgctgagaatctttatctaagaaaatatcattcggaatgtatttttcgcctaaaggaagggcattttctatgatcgggtgtcttgcttctttcaggtctatggcaaaactttcatttaaaacaggcttggtataactctcagaaacagccagttcggataaaccaacggcaacatccaattgtgcaataatcttagagttttcctgaatctgatcaatgtgaaccatcgtttcggaacatacatttctgtacagttcgttttctaaaacgccgatcttctcttcagctccaagaatctgattttcatattctttcagttcttctgtgatgtaccgttccgcatttaccagcgtctgttttctcaaccaatcgcctggaactttatctttatgggtatttctgacttcaatataataaccgaaaacgttattaaaatcgattttcagactcgaaattcccgttctttcgatttctctctgacacatttcatccagaaaaccacggcctttggattgaagccctcttaagcgatccagttcttcggaaattccttctttaataacgtttcctttagataaattcaccggaagctcatcattcagatggttctgaaggcattttatcaattcatcctgatcatacaaaggatccagccaagccagaatatcggcatgaggatgaagcaacgctttgattttatgaatattgattaaactctggcgaagatatcccagttctttcggtgaaattttttccgctgccagttttcccatcagtctgtctaaatcggaaatcgattttaataattgggaaatttcatatttaagatggtcgttttcgtttaaaaaatcaattaaagacaatcttctgttgatttcatccactgattttaacggtaagataattcttctcctcaacaatcttcctcccatcggagtcgaagttttatcgataatatctaataatgatttcccctgcggattgcttggatatacaatttcaaggtttctcagtgtaaaattatccatcatcagaaagtcttcctgcggaatgatctgaattttggtgatgtgagacagtaaattatgatgggtatcttccaccaaataagcaaaaatcgctcctgctgcggtaattgccaatggctgattttccactccaaaaccttttaatgaattggttttaaagtgattcgtcagtttttcgtaggcaaaattatactgatatgcccagtcttcaagtttgaaagcgtttttatttttaatctgttccggaatctgaacacttcgctggtaaataatctcactcggatcaaatgtattcacgatatgaagcagtttttccagatttccttcactcaccagaaattctcccgttgaaatatccaccaaagcaatcccgaatttctccttttctttatgaagggaaagaagaaaattgttcttttttgaatttagaacctgatcgttgaacgtaactcccggtgttaccagttccgtgactcccctttttacgattcccttcaccattttcggatcttccaactggtcgcagatcgcaactctcattcccgctcttacgagttttggcaaataagaatctaccgaatgatgcggaaagccagccagttcgatatgaccttctccattggctcttttcgttaagacgatccctaaaatctgtgatgtcctcacggcatcctgcccgaaagtttcgtaaaaatcccctactctgaatagcaaaagtgcatcaggatatttcgccttgatggtattgtactgcgtcattaacggggtttctttcttcgctgcctttgccattacaatcgttcttaaatttgggtcggtaaaagtatgaaataaaatagtagaaggaaagtctgaaacttacaacttaaaaaaagaaatttcttttatcattaagaatgtttagccaaagcttccgaacttttcttatatgcccacttctgtttgtaattcacccacttagctttaaaaattttgcgcataattttatcggtatatcgcataataaaaacatgatagagcatatttgcgaaaacattcggtttattgggtaatgcacgaagcgacattgaaaatccgggttccagatagcgattaaaatgccagaacgcgccgggaataaaaagcgcatcgccatgttccatgaaaatttcaaaacctttggcatgtttcaaggcaggaaatttttcatagtcaggattttcatagtctacatcataaatggtatgaaccgataaaggaactttgtataaaaaagcggattgtttctgatcgaacaacagaattcttttctttccttcaaaatgaatgtgcagaaaatctcccaagtccacatcataatgcatcagaacatgcgcttcacttcctccgaagaacaaggtcggaagacgtttgaaaaatttcattcccaaatccggatacgtaaagtttttcagcagttccggaagccggtctgtaatgatataaaagaaaatcctgagatcggaaggtttactttttatcgtatcaatataatccctcattttcattttggtaaccggagcatcgctgcttttattcgcgtcggcaggtttgttgtcgtacaaaggaacttcctgttcacctgctttttcacggataaaatcaaaattccatttgtcgaaggcatcccaccggcttgcaaaatttttaatcagaagcggtttatgctttttgaaataatttttctggaaatcttctttactgatatcgttaacaacatctacactttcgagaatcattttgtgtggtatttttaatgcgaaataaaaatagtgtttttttgaaatttggtgaaattttaaagataatataatgtcacaaggattttttacaaaattaaattttattcgatatagaattggcagaattcgtttttaacgcgacgttcgcaaagattctttttaaatgctgaaaatattcttccgttcgctaaggcgtttcactcagctaaggatgattgctataacttgctaaactcaatgtttttacaattaaagatatctcttatccctttttcaacgccttttttttcaactagttacttttgctatcatttgctgaacacagtgccttggcgatcaaaaaatatacataaaaaattaaaataaatctttgcgaacgtcgcgttaaaaattaattatattctctaaatcacatctttaaaatcacaattcatatgttttaatttttttagtaaagtcgggataaaactaaaattttatctttgtaagacgaacgaaatctatgagagtttacaacaccaaacatttcctgaaaatccttttcagcttacataaaagtgacactttaaaaatattatttccaagcatgattctcgtcggattatattcgtggggtgtagaataccttgaaattgagcatttccggcttaattcaaaatcaggaatcagcaatgtgggtttaattcattctctattaggctttgtgctttctttgttgttggttttcagaacaaacactgcatatgaccgatggtgggaaggcagaaaactgtggggaaaactggtgaatgacactcgtaattttgccataaaagtgaatactattttgggggacgacagacagaatgctgagcaaattgcaagatacttaaagttttttccgcattttctggcaaaacatttatctaaagaatctacacgactggctttggatgaagattattcggaaatcgagaaagagctgaaaaatcatggcccgagtgaaattatcattctgatgagccacaaattaaatcagttaaagaaagaaggaaaaatctcagatattgaaatgctgtatctcgacactcagctttccggttttctggatgtttgcggcggttgcgagagaatttaaaatacgccgattccgtattcttattcatcgttcattaaaaagtttatcattctgtatgtttttgcactgccgattgcttacgttatcaatatcggaaattacattatcccgcttacggtattcatttattatgttctgatgagccttgagctgattgccgaagaaattgaagacccttttaataatgacgaaaacgatattccgatggaaaccattgcccagaatattgagaaaaacgttcatcagatcatgggtactaaaaaataacaaaatccgtttttatctgaaaatcgtaaatatttatacctaattttgacaaaaaaataaaattggtacagaaattaaaactggaagaactcaacagaattgatgtggaaacctttaaatcggttgagaaaattcctttggtagtagttttagacaacatcagaagcatgcacaatgtgggtgcaacgttcaggacggcagatgcatttttaattcataagattatcctttgcggaatcacgccgcagccgccacaccgcgaaatccataaagctgctttgggagctacggaaagcgtagactggagtcatgaaaatgatataaatgtaactattaatgatctaaaatctcagggatttgaaatcgtgggaattgagcagacgaccaacagccaaatgatcacagatttcaccatcgataaaacaaaaaaatacgcggtgattttaggaaatgaagtggaaggaataagcgatgaagcgttgccgaatattgattcgttccttgaaattcctcagttaggaaccaaacattctttaaatgtaagcgtttgcggaggaattgtgatgtgggaatttgcaaaggctttaaaataaaaaaactgcatatgtctaagagacagtgcagtttgaaataaatctaataaaaagtaaaaatgaaaggcgacaaagataccctttttttttacaccaacaaattttaaaattatttttttttattttcctgaaaaaaagtatcattttcggaaaaagtttcgtttaattttttataaattagcacaatgtttatcaaggattatatctcaaaagacttcccgtgtttcagcctttctgactcgatagaatcagcgagggaaatgttagaggcatttggatattctcatattttcatcaaaaaatcccatcatttttacggtgcaattgcacaggatttcctatatgaagaggaagggacgctgaaaaacctcgaacatcagatcgagcgttttgccattctggaggacaacaatattatggacagcatcagaatattctataccttcaattccaacgtgattcctgttattaataaatccgagaaatatctgggatacattagctgtgaggatatttttcaggatttttcaaaatatccgctgttttccgaatcgggtgccattcttaccgttgaaacaccggcaagaaaatattcgatgacggagatcgccaatattgtggaaagcaataattccaaattttacggcgcgtttatcagtttcatgtcggatgaagtgattcaggtgacgataaagatcagcaatgaaaatctgagttctattgatgaaacattcgaccgatatgattaccgcattgtacaaaagtactattctgatgaaaaatcagacttattgcaggacagattcgggtttttccagaaattcatagaaatataaaaactaatgaaggcagccatttattctcagaaaaaagatcttgatacttttttatatttaagcaaatttatttccgagctggaaagcagaggtgtaaaatctgttttgtacgatgagatggctgaagcgcttcagttttcaaagatttttgagacatttaataataaaaaagaccttctggagaaagaagtggatcttttcttcacttttggcggagacggaacgattgtgaattctctcaccttcattgaagatcttgagatcccgatcgttggggtaaataccggaagattaggatttctggcaagttttaccaaagaagaagcatttaaagagctggattctattctgaaaggcgatgttaaaacaagccgccgttctgttattcaggttgtttcgcctgttcttgaggattttttcccgtatgctttaaatgatgttacggtatccagaaaggaaaccacttccatgattacggtagattcttatattaataatgaatttctgaatgttttctggggagacggtgttatcgtttccactcctaccggttctacagcgtattctttaagttgtggaggtcccatcatttctccgaacaacgagaacttcgtcatcacgcctattgctccgcataatcttaatgtaagacctttggtggtgaatgacagcgtggaaattaaattcggagtcgaaagccgcgtgtcacaatattctctttctctggactcgcggttgattcatatcgaaacagatcaggaaattgtgattaaaaaagcggattttcagatattactcgttcagccgaataacttaagtttctacgaaaccatccgccagaagctactttggggaagagataaaagaaattaagaatattttaaaaattattacctttacaggaatttaaaaacaccctaataatttatattaaaaagcaaaacatgagcagaattttcccagcaggagttgccacaggtcaattagttactgatatttttcagcatgctaaagaaaacaaatttgcattaccagcagtaaacgtaattggttccagcaacgtaaacgcggttttggaaactgcagcaaaactaaactcacctgttatcattcagttctctaatggaggagctgcttacaacgcaggaaaagggttaagcaatgacggacagaaagcagctattttaggagctgtagccggagcaaaacatatccatacccttgcagaagcttacggagcaacggtaatccttcacacagaccatgctgcaaaaaaattattgccttggatcgacggattaatggatgctaacgaagaattctacaagcagacaggaaaatctctgtattcttctcatatgctggatctttctgaagaatctctggaagaaaacttagaaatttcagctcagtatttcgaaagaatggctaaacttcagatgaccttagaagtagaaatcggggttacaggaggtgaagaagacggtgtagacaattcggatgtagataattctaaattatacacgcagcctgaagatattgcttacacgtatgaaaaactgaaagctatttctgataactttaccattgctgctgctttcggaaacgtacatggagtttacaagccaggaaatgtggttcttacaccaaaaatccttgataattctcagaaatatgttcaggagaaattcggaactgctgaaaagccgattaatttcgtattccacggaggttctggttctacgctggaggaaatcagagaagcgattgattacggggtaattaaaatgaatattgatactgaccttcagttcgcttacacagaagggatcagagattatatggtaaacaatatcgattatttaagaactcagatcggaaaccctgaaggagaagaaaaaccgaacaaaaaattctatgatccaagagtttgggtaagaaaaggtgaggaaactttctctaagagactggttcaggcatttgaagatttaaataacgtaaatacgctaaaataaattataaattttaaattatagattttaaattatttttaatctgtaatctaaaattcaaaatctaaaattttatacatggcattcgagtggtttaaaagaaaagcacaaaatattacgacatctactgatgagaaaaaagacgttcccaaaggtctttggcatcagactccatcaggaaaagtggtggaacatgacgaattgaagagaaataattatgtttctccggaagacggtttccatgtaagaataggaagtgcagaattttttgagatccttttcgatgaaggcaaattcacggaactggatgccaatgttgaaagtattgacattctgaactttaaagacacgaaatcttacacagaccgtctgaaagaagtaaaagctaaaaccaaacttacagactctatcagaaatgcagtaggaaccgtaaaaggtactgaaatggtggtttcctgtatggattttgctttcatcggcggttctttaggttctgtaatgggtgaaaaaatcagaagagcgatcgattactgtatcgagaaaaaacttccttatatgattatctgccaatctggtggtgcaagaatgcaggaagcaacgtattctttgatgcagttggctaaagtacaggctaaactggctcagctttcagaagcaggacttttatacatcgcttatctttgtgatcctacttttggcggaattacagcctctttcgcaatgacagcagatatcatcatggctgaaccgggagctttaatcggtttcgcaggaccaagagttatccgtgaaaccatcggaagagatttaccggaaggtttccagacttcagaattccttcaggaaaaaggttttgtagattttatcgttaaaagaacagaaatccgagatactgttgccaaaacagtaaatttattagctgtaaaagcataataattgtaacaaaataacacaatctctctctaattagggagagatttttatttatgagaactttcaagatatttttcagcactatccgaagtatgagttttaaaaagattatccgtcttttaacgcttgttcttcctcatcctgttttctcattgctcagttttcatgccaccgttcaggcatatacgattgctcagaaaaaattccctaaaaccgcctctaccaatggtgtgggaaatgcattcaggcacgcattgtggtgctgttttattgcgatgtactgctctaaagtctcctcacctcagaaagcactgaaattctgtaaaagaatcaccgatatgcacgaagaactgtttcctaacaagcctctggaaaccaaaatggatcttcacaacaacaaattcgggatgaattactttaaagaactgcttccgggagttcaccgccagtttttcgagaaaagttttttcattgaaggcttagaaaagaaaatgaaagatgctaaagttctgaaaaatctggacgatgattttgaggggtttttggtttatctagattgatatgattatattgtattagtttttaaaacgaaaataaattcgtctttaaatattaatttaaactaatacaccatgaacgaaagatactcaagaaaccgactttatgtaaacaatagcgaacaaagtcttattaaaaattatcctattcttcttgcaggatgcggaattgggagcaatattgcagaatgcgctttacgttttggctttgaaaatataactcttattgatggggatatagtagaaacatcgaatcttaaccgacagaattttaccgaaaaaaatttacagcaaaataaagctgaaaccctttataaacggctaaaagaaatcaatcctgatgcaaatatcaaatatataactgaatttattgatgataataacgtcaataaaattctaaaagacataaaaattgcttttaatgcattagactttacttcagacattcctattgtttttgatgaaatagcgcaaaaaaaaggaattcccgttattcatccttataatttaggatggggaggattagtaaccgcaatacaccccaacggaaaaaattttcaaattttgagccatgataagcaattgaatgaattaaaagttgtagaatttgttatggaaaaattagcccaagaagaaaaagaagtattctggcttcataaagtagtaaacgattataaaaatgaaaaagaaatcctccctcctcctcaactatcagtaggatcttggcttgttgcaggcatgtgtaccaccctcttatacaaaatagtaactcagaaaaaaagcaaatattttccagaattttactttaaaaccattgtagattagctaaataagcttgttattagtggcataagccaaagcttctgtaatattttgtacattaattttatcaaaaagctttctacggtgaaattttattgtatctgcggtaagatacattttctctgctatttcattaatggtaagaccttgtgcgtaaagaagcaaaatttctgtttctctgtctgagagttttatcttcttacttttttcccatttatttgatgataaccggaataaccagatatcatcacttccatctttaaaaatctgaatatttcctgaagtattattttgcgaaagagagacaatacacattgctttccatatctttccttctttattaagaaatagaggtgtaagcttatgattaatcagtatactttttcctgaatcttttaccagatgaaaatcataagaaattgtataaagttttctttcttcaacaggaatattttcataaaaattaaatcctacttcattaattttcagcaacaactggagatcatctttttttacatgcttaaaataaaaggcataacccaactcttttacttcgtcaggagtatggctgcataagaaaagagggttatccgaaacataatcaaaactttttttctgataatctattatataaagacttttataggtaattcgggcaaatgcttttacaggttccagataatcaaaagtctgtagaagttcattctgcgaaagattattcacagtattcctatccgaaaagaactggttgatttcatccatacaaaatttttatatccaaagcacactacactcgagtgtagttttatgtctttgataacaaatctacacaaaagtgtagtaacatctcataaaaatcaaaataaatttaattaaaaatcactaaaccatgaaaactattaatttttcagtcttagaaaactccgaattaaggaagcttgccgaatttgttgtacaggaaaatttctcacaccacaatgaaaatttttgtcatgatccaagttttattagaaaggaaattgaatatattctgaatgaagaaaaaagtttttccaattcaagaataattgttgcacaaaataataatcaaatcattgggtctataagaactttaaaatggaatatgaaagacatattgcctgttgaaaaaatgttttctgttaagttaaacagttttctcgatggtgagcaatacaatatttggcatatcggaagatttgcaattaaaaaagggtataaagaaggaggaattaatttatttaaaacactaatgacttttgccattcaggatgtatgcagtgaagaaaatgcattagccgtcgctgaatgtgatgctaaacttttaaaaattttaaaaattttaggtataaatgctcatcatattactaattctattcattatttaggttctgaaaccattccaattattttagaacatgaaagtctaaagaactttcttaaaaaaaatatttatctagtaaaaaattatgacttggatattctacacagaagtgtagtatttaaagactctattaaaaactacacttttgtgtagctaacaaaaaaaaacggctcattatctttgatgttaatcatgaaaaacatattattttttttaacatttattttcttcggaatttttataaaaagccagacaattagcggcatagttgtcaattcccaaaatcagggcattgcatacgcagaaatatccttaataaaagaaaatataaaaaagaatacaataagtaatagtaacggaaattatgaaatatctgttccagagaagggtacttataaattatcagtagtaaaggacggagaagtaattataaagaaagagattggtattacagaaaataaaaccgaaaatttgatttcagaactaaaagaatctcaaatacagggcgtaagtattgctagtaaaaagaaattaattgaaagaaaaatagacagattggtttttaatgtagaaaattctatatccgcaagtggtagtgacgccttggaaaccatgggaattattcctggtgtaaaagtagttaatgaccaaataggaattattggtaaaagcaaggtttctatcatggtaaatgacaggcttatccagctttcggaaagtgatcttttgagttttttgagaagtattaaatctgaagatattaaaaatattgaagtaattacaaatcctccatcaaagtatgattcggaaggaaacagcggtcttattaatattaaactaaaaaaagcaaaggagaattatcttagcggaaacctaaaaaccagctatacacaagctacctattctatgggaaattatggagcaggactaaattatcaaaagaaaaagattaccctcagtacaaatattgattatgaaaacggaagtatagcaccttatcaggaatatacactttattatccaagttatacttggtttgaaactaataaatcaagaagttttagagataatttaagtggccggttttccttggattatgagataagcaaaaaaacgactattggaatacagtatttaggaggtataaataatcctattcgaaaagggaataattcttctgaaataagctctaagaaaggattagattccctgataattactccctcagatttacgtttgaaaaaatataatcatgcagttaatcttcatacgattacaaaactagatagtattggaaaaaagatatcttttgatttagattactttacgtttaattctaatgcagataatcagttttctacatcttcgtatttgcccggtgattataatgctaagacatttctttcggcaaataatttaagtaaccaagatattaaaatttattcttcaaaagctgatatagaatttccgttgaaatgggtaactctatcttttggagcgaaagtttcatttattaataataaaagtgatgttttatattttaatacaacaaatggcaatccttttttagacttcggtaaaagtaatacttttgactataaggaaaatacacaggcaatatatttatccggaagtaaaaaactctcaaaaaaatgggaaacgcagcttggttttagattagaaaacacacaaacaaaaggctattccgaaacattagaccaagcaaataaaaataattatactaagctgtttcccactctatatattaactatttaatgaatgaaaatagtgtatttgggtttaattacaacaggaggattgaccgcccaacttattctgatctgaatcctttcagattttatactacaaaatataattatggagagggaaatccttttttacaaccctattttacagataactttgaaatatcatacagctataaaaacaattatgcttcggcatatttaagctatatcaataatggttttgatcaggttacatatgtttcggcagataatcccgttcaggcgatcataccgagtaacttttataagcagataaatctggggatactggaaagttatcttttcaataaatggaaatggtgggaaagtaataatcaggcaaatattttctatacgaaaacaatgtcagatattcccaataccctgacagacctttcaggatggagcgcatcagtaagttctaacaacagcttcactttgaactccgcaaaaacattaaaagcagaacttggttttaactaccagtcgccttcaatagcgaacagctataaaatgtcatctttttattatttcaatactggattaaagttgtcacttctggaaaaaaaactgcagatagcattaaacataatggatattttccgaacctataaaatgacatttacacaggttgtaaatggtataaaacaggaaaactttgattatcgtgatactcaaaaaataagaatctccgtaaattggaattttggaaaaacactaaaaatacaatccagaaaactaagtaacgaagaagagaaaaagagagccaattaaaagatttgattgtagttcttcatatagtgtacaatgtatgaaaactacaaataaatatcccgcttgcaagcaagagtgaaaatctaggaattatactctttaaactatgattctactgtttaacctaaaaaactatttaacatgtttacattcaacaaaaaagaaactaagaacttagcaaaaaattctggtttaatcaagaacaatgttctaaaaaaagctgttttacaattggattctgaaaacaggatgggagctgcaggaccggtagtaatcggttattctgaagtggtttatgatagaattatccacgagagaactattaaaactttcttctaatagatatgagaaggatatgcttcttatgtatatccttctcttctttttttattcttaaaaacctagtaaccaatgaatatagaagcacttgtagtaaaagtagcgggaagatgcaatatcaactgtacatattgctatatgtataatcacgcagaccaatcttataaacttcagccaaaatttatgtctaaggaaacgattctggctctcaaagaaaagataaaaaatcattgccataagcactcattaaaaaaattctttgttgtgttacatggcggagagcctctattaatgaacataaaggatattaccttttttcttcagacgctacattctttacataatgatgatatagaaatcctatttgctatgcagactaatggaatgcttttaagcaaagaacactgtgagttatttagcaaatatcgtgttgggattggagtaagtttagacggaggaaaagaagttaatgataaattcaggattgataaaaagggaaaaggtacatttgatagagtgaagaagggaatggatgttgccaataaatatttagattacaaattaggttgtttatctgttattaatttcatgtcttctccggttgaactctatgaaacatatagaaatttaggtttttctatcatcaatcttcttttactggatgaaaactatgatagtatagatcaggttcccaaacttaaaaatgcagaatggctgatagaattatttgactattggtataatctcaaagatgatgaaaacaaagtttctgtaataaaatttgaagattatattaattatatcttcggatcagaaaacggtactgaaagttcaggaaagggatataacaaattagctgttattgaaactaacggagatatagagtctttagatgtattaaaaatatgtggcgaaagctttacgaaacataaatttaatctccacacgaacgaattcgacgatattttccaaagcgatcttattgatgtatattataatagtaagcagatgttaccaaaaaaatgcttggcttgccctattcatgaagtttgtggcggaggatatttgcctcatcgctacagctctaaaaacggatttaataatccttctatatattgtaatgatcttctaatgcttattacacacattcagaataaagttatagattctttacccgaagatcttataaaagaaacaggtatccaaaaactcacttatgaagatgccttaaaaataatagatgaaaaacttcccacgattcaggaaccttcttacgcgaaaaaactggaaagttttgccatgaattaatcatatttcctcacaataaaaatatatttttagctgaaatcaatcaattcgcttaaaaattagaaaaaaattgatgaaaagtttcccttttataaaacaactagatagccaggattgcggtttagcctgccttaaaatggttagcaaatattatggtgttttgctatctgactctgttttttcagaaagtaacatttccaaaagagggattaccatatctgacctcaaatatacctccgaagaattaggcttcgatgccttaccagtaaagttaagttatgaagaagcattatcaaatattaatgttccttctgtctttttctggaatcagaatcattttattgttgtttataaaatgactccaaaaaaagtatacgtagcagatcccgcctttggaaaaactgtttacaccaaagaacaattcttaaaaggctggactcaggaaaaagaaaaaggaattatattaattctcgaacctacagaaaatctgcatgaaaaatccgatgagcacaaaaaaaatacatccagaaatcttcagtatataactcaatatattaaaaagcataaaactcaatttttactaattgccattactcttttagtttcatcatgtatcgagcttatatttcctttttttacacaaaaaattctagataaaggtgttgctttaaaacagataaatcttatttatctcattttagctgcgcaaattggactttttttaagcagagtcggactagaatattatcgttcttggttatttatacatattagcagcagaataagtttatccatcatttcagattttctggcaaagctaatgaaacttccattaaaatttttcaatagtaaaaatacaggagatcttttacagagaatacaggatcataaaaggattgaagaatttctttctcaagatcttatccagacagttttctcttttttcagcatcatcatatattcatttgtattattatattttaatccaacaatattttttgtggttttgattggaacttcacttgaacttacatggatttttaatttttttaaaaaaattaaaattttagaccaaaaaacattctccctacagtctacggatcagaataaaatctacgaaattattaactcaatgcaagaaattaagttaaataatcttgaagaccataagcgtaacgaatggagttctatccagtctaatatttatctgaataatattgagaagcttaaagtaaaccaaaaatacgaaagttataaattcattaatttttttcagaatatgctggttgtttttacctcatcactctctgtaatgaacggccaaatgaccataggtaccatgctatctattgtctatattattggtgggatgaacaatccaatatctcaactaattacgttttttctgcgatatcatttagttaaaataagttttgaaagacttaatgaaattcataataaagaagatgaagaaaatataagtaaaatagataacttagagagaatttatgatatttcaatacagaatttaagtttttcctacgataacactcattttatcctaaatgatattaatctgagtatacctaaagggcgaaccactgccattgtaggagcaagcggaagtggtaaaacctctcttttaaaacttattttaaaattttataacccacaaatgggaaatatatctcttgaaggagttcctctcaaagaaatagaaaatataatatggagagaaaaatgcggcgtaattcttcaggacagctatattttctcggatactgttgcctacaatattgcgcttgaagaaaatcctgataagaataaactaaaaaatgctattgctttagctaatatttcagattttattgattttttacccttaaaaatagacactataattgggtcagaaggtataggattaagccaagggcaaaaacaaagaattctaattgcaagagcaatatacaaagatcctgattatttattctttgacgaagcaaccaattctttagatgccaaaaatgaaagaataatcgttcagaatattgacaatttcttcaagaacaaaaccatgattgtagtagcacataggctttctactgtaaaaaatgcggatcagataattgttttagatagtggaagaattgtggaacaaggcaaccatgatgaacttatacatataagaggaaaatattttgaactaatacaaaaccaattagaattaggtttataaaatgaaaaataagaaaaatttaatggataaaattccctcctattttacatttttaggagttctaataatatttttaagtatcattgccctgtatttcgcagctaaagttttgtttttttaattcataactaaacaaacacttttgcctaaaatttactacatttagaaccaaaataatcttgaataatggttctcagcagaatttggtcggcattcattatcattgccattgccattgcaggtataaaatacgtttcatcaggcaactacaaaactatttttaatgatatggttgtggggaaaggcggtgataccgtacagattgccactcagaaaatgaatgcactctctcttcttgtgcgcgacagcctcatgaaaaagactgattttgcggacagcagaattcattataaaacagattctttaaagcaggatgtaaaagtgtaccgtgttcaggaatcggatggggtaatcggaacttcagaaacggcagtgaaaatctgtctcggacttatcggaatcatgactctattcatgggcttcatgagtattgcggaaaaagcaggaggaatcaaccttttaagccgtttaattcagccttttttctcaaaattatttcccgatattcctaaaaaccaccccgctttcggacatatgctgatgaatttcagtgccaatcttctcggtctggataatgccgccactcctttcggtctaaaagcgatggaaagtttgcagactttaaatccgaataaagacacggcaagcaactcccagatcatgtttctctgtcttcatgcaggaggaatgaccctaattccggtttccatcattgcgatccgcgcctcgatgggttcaaaaacgccgaccgatatttttcttccgtgcatgatcgctacatttgctgcaactttggcagccatgatcgtagtttctttatatcagaaaatcaaccttttaaaacctgtagttcttgcctacgttggtggaatttctgccataatcgcattgttggttttgtacctcactcaattaagcaaggatgaacttgatgatttcagcaaagtattaagcaacggtttaattcttttcatatttttagccattgttcttggcgctgtttataaaaaaatcaatgtttttgatgcttttattgaaggagcaaaagaaggttttacaacctgtgtaaagattattccttatttggtcggaatgcttattgccatttcgctattgagaacttccggagtatttgacgtaattatcgatgggatgaaatgggttgcttattctgcaaatttagattcgagatttgtagacggacttccaaccgctttaatcaaacctttgtcgggttctggagcaagaggaatgatggttgataccatgacaactttcggagcagacagttttcagggaaaattggcagcggttcttcagggaagctcagacacgacgttttatgtcattgctgtttattttggagccgtagccgtaaagaatacaagatacacagtaattgctatgcttctagcggatttggtggggattattacttctattattctagcatatcttttctttgcataattatgagtaatcacaatcgaaatatttttgaaaaatcgactgagttaatcggtggattacaaatatttttgtctccatttttgattggaacagctatttcggcgataatatacttttccaatcctaataatttcaccctcgttattgcgattgtacttcttcttttagccactggtatcggtataaaattggctactaagatttatcgaagtaaagaaggaacgatcgattttatatctaaaacagactcaaccccggaaattgataaatttttaaataaagaaaaaaatgatcacagataaagaattcaccctacgattaatacgccagttaactcaggcattagaaaagctgattttggataaacctgaagaaagtttaatgcagaaagagcttgattttgaatctttaatgaaagacatttttaagtttgattttacaacgctttcatcaaaaccgaaagaggaaatcatagaaattgttaatgaaagacaggaaagagaccataaagattactatgaaatgttaggaaatcttttctattttaacggaaaacaatctgataataaagattttttagataaagcaaaaacattctacgaactgtatctccaaaccagcggaatatttgcgcttccggttatcaacagaatttcagaaataaaaaaagcacttgagtaaagtgcttttgtattttttagaacgtaattttatatgatcctgtggaagaaacactcgctttttctgcttttacatatttcttaacccacgatatcgcattcgaactaatgcatggatctgaagttccccccgatcttctcgccgagacaacgtttcctgctttatctacagtgtaagcaatggtaatcgttccgctcgctgtacagttattcgcgggttgtgatccgcctcttcccatcgttccggggataaatcctaccagttttcggtcgattcctactttactgtcgccatttccatctccgcctaaaggatctcctgcatttccgattccgtttccatcgccttggcttcctgcttttgtcccacgtcctctgatcaaatttccaatggctgcgtttccttttccgtcaccatttccagttttggaatttgcggttgtagctcctgattttttagtgtttttggttgcagaggtacttgtggatgtctttttagtttctgccttggattcttctttttttggaaccgaagttttggtattgtttccggttatgaccttatctttcgcttctgtttttttggtttcaggctgcggatccggctggataaccgtcttggtttcaggaacagcggtttctgaaggttcagaagcgacttcttctgtcgcagcagcaagacttcccggctgatctgccggttcttctaccccgtttccgtttctgttatctccaaaattaaccagcatggttgtaataacttctggctgttcatcgagttccggtttcagtttatacagaaaaacaaataaaagaatggcagaccaaatgagaatagaaagcactgcgctttttatcctgtctctgttttgctcatctttattaattatatggcttctcattttaaaatgctccttacttcgaagagttatttatctttaacggttgcaatggcaatattgaatttatgtttctcagcaatttccattacaaaaaccacgtctttatgaagggtattttcgtctgctcttatggtgaaagatttattcgcctgacctgttaatttattgacaatggtctgttccaattctcctctgttcacaggattatcgtctacaaaataagacccatccggttttacgctcaccactaaaggattcggaatattgtctgctgcggtatctgctttcggcaatttcacatcgatcgcactttgattggctgccgaagaagttaccataaagaagatcagcatcagcaagataacatctgtcatcgctgccaaactgaattccgggtttgctttatttcttctctgaattttcatctgttgattcttattttatgtttgtcagatggaacctttcggtttcataagaaaaaattataacggtttattgataaggtctaaaaattctccggacatgttttgcgccttcaatacaaacttatcaattcttgtaagtaataaattgtagaaaaagtttgccggaattgctacagcaagacctactgctgtttgtcccaatgcagtataaatgccttcagacaaagttttcggagagaaagaacccgttgcatgagacaaattgaagaatgcgatgatcatcccgattaccgttcccaaaagtcccaacataggagcaatacttggaaccaccgccaaaagattcagatttttttccatgttggcaacctcaacctgagcctgagattccatcgcacttacgatatccgaaacagggcgccccagtcttgaaattcctttttctaaaattctgccttccggagaattctgtctcttgcaataatctgcagcggattcaatcttaccttctctgataaaatcttcgatattatccataaaattggcatctgtttttgaggttaatcttttaataaagaaaaagcgctcaaagaaaagatatacggaaaatacaccgagcaacaacacggttaccatcactattttagcgaaagctcctccgtggaacatgattttccaaaatgagaattctaaatcgtctgccgctactgaaggtgcagcaacttgggcaaataaaatctgagtaagttccgttaacagcattaaagtgtatttttataaaagttgtaacgacaaaagtaatggaatattatgaattgaactcttaaaaattgcttaaaaacaacttaaagtttgttattttcataaacagcaaatttctttccaaaaatgatttgaaaagaaatctgatataaaaatgtggagaaagattatacttaatcttcgtctacctctatttcttcctgcttaaattcacatttcagcctgaaaggaatcggcgtgtctgatcctgtatagaaatcatcaatcgttcctttccagattacctgaagttctccttcttcatttttctcaaactgaagctcgttatcataaataaacgcttcctcgtcatcaaaaagatctacttcggtatatgtatcttcatcagagtcattaatggtgatggtttttccttctatttccgcggaatcaatagggaaatcgaatacttcaagagagagttgcggaaagttgtactgtaatgaatcatcctctacatgatccagactgtcatccgtaataatttcaacttccagaaaatgttgttgattgctgtaaaccgctttgcaataagtatttctgatattgtactttagcgtttcgtccggatggtaaatttttaaaatccctttcattatttcttaaaaaaaagagcggtaataatatgattgttaaacgttttcaacaaagataaaaaatagattgaacgtgaaaaattttttgaaaagtatttttaaaaaatctgttttaaattaatataataagactctaaaattttaaacttatgaaaaagtgccgctatatgataacgacacttatacaaaaatttaattattaaaataagttattcaattttttcggctttaagctgagtcgtattcaatcgtgcattgcttggcgcatttgcagatttttgaaatttcagttcagaaccattccaatgaaccggttttcctttggaagaagtatctgtttcattatgaagtacggcagtcatattttcgtcataatcctttgaaagaatttctttcggaacggcaacattttcaagatcttttctcgttcctacagcaatgtatgagaattttacagcattgttatcatccgttttggcactgaatcctgtttttgtaggctcctgctcaagatagatctgagagcttttcccgattggggtaatggttaccactacagaattttccgcaacaagatcagagaatttcctgtcaaaagaaacatttatccttccgctttcatcaagagttgccgttcctcgtgtataaatatctgccgtggtagacgtaggaacatacgttgtaattctttctgcgcttccgtctacagtacttacattagcaattacattattggtataggttgcaccgtccacatacattccgtaacggcttccgctcgcattaattccgtaaacatttcctctaaaagcagctcccataagatctccaactcccattactccaaagcccgctgcctcagaacccaacgcagatctgcctgttcctgtagacatcgcggcatttccatatacacctgcattagccgatcccgaagttcgatatcccaagactccgaagattcctgcaacctgcgaatttcccaaaacaccacccgatctgtcaacagccgctgcgcctcctaccgaaagaacctcgcctaaaacaccaaaaatataagcatcattagccgctgtaggctctgcatttcccatagatccgtaaagagttgtgtgtgctaatgtggtagcggcagaactcggccctgaatatccacttccggaattgcttgcagcagtacttcctatcgttctattgccccaaactcccgctcttctcgtggaaacatctgcagttgcgtccgtagatgttgtcgtagtagcagtatatacaccggaagatgtacctgccgaaagtacacttactcctcctcccgtagaagttgtaccatccatctgaactctaattccgtttcctgtagagtttccgctatgaatgagtaaaattccattactagtggtagccgtgtttgtattctgtactctcaatccttcccctgttccactatgattaataaaagctcctaatgacggatttgttgctgccattataacatttaatcctcgggaatttgttgctgtcccattttgattaatcactaacgccctatccaaagttgtggaacccatatcaatatataatcctttagatcctgtagcggataaacttccggtatctgcagcactactcgactgacttatgattgcaccgggctgattggttgtccctgattctaaaatgtgaatttttgcagaaggagctgttgttccgaatcctgaatttccgttattaagaagagacattccacttgctgcaacattacttggctgaaacctcgcaaaaatacctgtcgcattagaaggtgctgcattgttgatgattctcaccaatccatttgtagaatttaaggctgtacttgtagaagtaatatccagcaaagttcctgtagttaaagcattggctcttaaagtgagtggcgtttgcgtacttgcagtagtccaatcccaactttgcgcaaagtttttactgtcgatcgaattgtttgccgttccgtcgataagtcctgaaattggtgttttcgctgccgttccaaaattattaatagcaacccattttgctaatccggaattataataataaaatccaggagcggtaagatctattgtacttccggtaagactagtggctgcagttgtcgcataaatcatcatagaattttgagaacttcccagaagaagctccatgcttttaatctgatctcctgttaatcttggaattaaaataccttcgggttttgttccactggtttttgaaacaatttcaaaagttgtattgggagaagttgaatttatacccacttgagcataaaaagcagagatgcttgaaaaagcaactgccaggttaagtagttttttagtcatatcaattaaattagattttcatcttaaattaaataataattaaaataattcacaatacttttacttattatttaattaatcgctaatatagaaaaaaactaacaacacaaaaaatatagcataaataattatttttttttacacataatttaaataaacgcattttttttaattaataaaacaattaaatatatttttaacccaacacagacgtttttaaattaaaattttacaattatcaatatcatttcatagaaataattggatttaatgtaaatattttcattaaagagaataaaataataaataaaatcctctttatcatcttaattgtagttgatcggaactttacattgatataatatttatttttgttctctaaagattccggaatgaaaaacatcatatcaaaaagtattataggattaggcataatgatcagtttaggatcatgcaaaaaatccgattcccctttaacgaaagtaacaccatccaatctggattctattgcttccaattattatgaacagtatcttaaattatatcctctggatgcaacttcacagggagatttacgttataacgatcagcttccgattaacattgataaagattttatctccggagaagtcgctttctaccgttctgtagaagaacaactggagaatgtggattataagaatctttcagacgaagataaagtagtttacgatgtgctgaattttactttaaaagataagatagaaaactacaattatcatccggaatatattccttttacgcaattcggaggtttaccgcttaattttccattgtatggaagcggagaaggaagccagccttttaaaacagaaaaagattattctgactggctgaaaagaatggaaaaatttccggaatggatgaatgccgccaccgataatttccgcgaaggaattaataataaaatggttttgcctaaaaaactggtggtaaagatgattcctcaaatgagagccgaagaaattataacgactgattttgataagaatattttctacggaccgatcagaaaatttccgaaaaatttcacaaacgagcagaaagaaaaattttcaaagctttatcaggacgccatcgtgcagaaaattattcctgcttatactaaaatgggcaactttttggaaaaagaatatctaccaaaagcaagggaaacagacggttacaacagcctgccaaacggaaaggaaatttacaggtattatgcaaaaagctggacgacaaccgataaaacgcctgaagaaattaataaaatcggacttcagcaggtggcaatgcttcgtgcggaaatggaaaaggttaaacagcaggttggatttaccggcacattggaagaattcattaattatgtaaaaacagatccaaaagcaatgccttacacgagttcaaaagaagttttagcggcattcaacggaattttaacgaaaattacaccgaagctgaaaaccatgttttccgtaacaccgaaaacaggatttgagatcagacaaactgaaaaattcagagaggcgagcgcaagtgcggagtatattcagggaacaccggacggaaaaagaccaggaatattttacgttccgcttccggatccgtcaaaattcaacgtaacttcaggtatggaatctttgttcttacacgaagctattccgggacatcattatcaggtttctttacaacaggaaaacaccaaactcccgaaattcatgagattcggctggtttggagcttacggtgaaggatgggcgcattattgcgaaacattaggaccggaatttgggctgtacacagatccttatcagaagatgggctacctgagcgaccaaatgctaagagcagtaagactggtagtagacacgggtctccacaccggaaaaatgaaacgagaagaggcaataaaatatttcctgagcaatatttcttacgatgaagccggagcaacctccgaagtggaacgatatatggcgatgccgggacaggctttaggctataaaatcggttcattgagaattcgtgagctgagagaaaaatatcagaaagaactgggcagcaaatttagtttagccaaattccatgatgaagttttgagtcagggctgtcttcctttagatgttctgaacagaaaaatggaactttgggcaaaaaaacagaaataatttttgccggaatcactaaaacgcaaaaaactttcttaccgcaaaagatataaaagattttaacacgtgagttggttaagtttaatccttaaatggaaagaaagatcacataaggtaaaaaatcaaatatttttctctttgaaggcttttgaaatactttaaataaatctgataaagtcttttgtgtatcttttgcggttaaatttaaaattgattgtccgtttattaacctaaagcttcgacaggctcagcttgacatcgctaaaaatcaagcgtttagtattagaggtgtcacactgagcttgtcgaagtgcctgttataaatgattgattttcatatcaatgcataataataggttgtttaacggatatttaaaattgatttaaacaaaattatagtttgcgcttttgcaattaaagctgaataataaaaaaatacaacgaaaaaaaaatgtttacagtagaacaaattgaaaatgcacacagcaaggtaaaatccggagcagattttccgaattacatcaaagaaattaaggaattaggcgtaaaatcttttgaaacatgggtaaaagacagccataccgaatattttggagaacatgattttaccacaaaatccgaacctaaatatgccaatctaattattgaagatcagactgataaagaaaaatttattcaacagttaaaaagtcatcagagaggagagacggattatatgaaattttgtgaagactgcgctgaaacgggaattgaaaaatggattgtagatctggatcaatttacctgcatttactacgacaaagcaggaaacgaaatcctaacagaagaaattcctcattaaaaaactgaagtcacaaattaatttttgtggcttttttgtttagatttatgttttaaaacagattatgataaaaacacttctttttttaagcttttccattttgggattgtgttttttaagctgtaaaaaagaaaacaggaaaattttaaacctgaaaatattactgttgatgaaaatttaagtaaaaatgacacattcaaaattctatcaaaatatcctgagcttaaattatttaacagtgaaaaagtagaaagtctaacaagaaccgctcatattgtacaagaagatggttattatgaaagcattttctatcctcgaagaaagcaatacagattttttcagttcagcgattataaatgcaaaactgaatacaaaggagatacgatcaatatctggcttaacaattacaacggatattttggaaacggagttttggtaaaggtttttaatgatcagtttttaattcaagatattgacccaaaaacattaaaaggcgaaattaaatttatcaattcttatccggtgtatcagaaattggttcttaataaatacaaatttcaaaaaaacgacagcatttacggatttatagactataagactactatagattcattagttacaaaaaatttcagaggacattttagaacaaaaattaaataaaaaactatgacagcaagtctaacatccttattcctaagagatttaaatagactgaaacaggaaattgaatcttataagaatgaaacaaatctctggaaaacagaggcaaacatttcaaattcggcaggaaatttaacgttgcatattgtgggaaatctcagtcactttgtgggagccgttttgggaaattccggctatgtaagaaacagggagcttgagttttcatcaaaagatattccgagaatggaattgattcaacagattgaaaagacgatcgaaacggtgacgattacgcttgataggctggctgatgaagacctccagaagcaatatccgcttgaacctttgggttatggaatgacgacggaatattcctgatccatcttttcgggcatctgagttatcatctgggacagatcaattatcatcgaagattgttggattgatttgcttcttcatctatttaaccaccccgtcaaaaattcttccgaattttcgccacccctccaaaggaggggaattcaggcttcggaaaagactgtttatttttcgaacagcattttggtgatgaaatctttggctccgtttcctcgcgcgggagaatattctcttccgtagaaaataatctgaagatgaagtttattccacacttcttctttccagagttttttagcgtctttttcggtttcaactacgttttttccggaagtgagcttccattgtgtcattaatctgtgaatgtgggtatctacaggaaaagcaggaaatccaaagccctgactcatcacaacggatgcggttttatgtccaactccgggaagcgcttcgagttcttcgtaggtttgcggcactactccattatgtctttccagaagaagttctgccattcttttgaggtttttggctttggtattggctagtccgatttctttgattaattctttaatctgatattcctccagttttgccattctctgtggagttcctgccaccgcgaaaagctcaggcgttacctgattcacctttttatcggttgtctgtgcagaaagtgcaacggcaaccattaaagtgtacggatcggtatgatccagcggaatgggaacttcgggatataatttttctaattcggtctgtacgagttcggctctttgcttttttgtcatggaagcattaaatttgaacaaaaataaatcattatgttgaaagtcggagataaattacctcaatttgaaggaaccaatcaggatggtgaaacggtacattctgaaaatctgatcggtaaaaagcttgttgtctttttctatccgaaagccaatacacccggctgtactgctgaagcgtgtaacctgagagacaattatgccgaacttaagaaacagggatttgaattgttgggtgtaagtgcagatcctgtaaaaaatcagaaaaaattcagtgagaaatttgaatttccgtttgatattattgccgatgaaacgcgtgatgttattgaaaaatttggcgtctggcaactgaaaaagtttatgggaaaagaattcatgggaattgtaagaaccacttttgtttttgatgaaaacggaatctgtacagaagttattgataaggtaaagacgaaagatcacgctgcacagattttgaaatagcttttaaataatatttctaatttaaccgcataagactcaaaagaataaaaatcagagatcttcaaaaactgttgaatcttttttgtggcttttgcggttaaattaaagtaaaaactatcctaatctgtttcgtaatacatcagttcctccggatcgttgggaatggtgacaaatttttggaattttaaccccagcttttcaattaatttctgagaagaaaagttgtcttttgttgtaatggcagaaatctttttcaacccgaaatcatccattccgactgattttatctctaaagcggcttcataagcgtacccttttccttcaaactcatctaaaagcgaaaagccgatatccacaacatccaatccttccctttcgaaaattccaactcctccgattttatgacttccttctttggtaagcattaaataatttccgtaacccaaccgttccatctgaggaagaaagcggtttctgatataatcttccgcatcggaaagggttttcagattacgatccccgataaactgaatgaatttcggacggttgtaaagatccagaataaattccgcgtcttccagagccatcggacgaagaatcagacgttctgtttcgtaaaatttatttccgtttggtggatcttgcgggtttctttttaggctcatctttcggttcttcttttttctcgatcttcagcaatcttgggttattggtgcattttttattataaagctcaatatacgaaccattatctttcgcttccgtaattattcctgttgatttactgatggttaaagtaaaatgttttttctgataaggacattctgtagaagtcagctttcctaaattcagataataattggatttatcttcgtaataatttgccgcaatatctctgaattcttcatcgataatataaccgtctgttgctgcagaaatggcagcatcctgaatgtcatcaggttttcccacaaagtttttaagcccttcaagagtggtaacatattctgtttttcctccggatacatagacgatgaaataaaattcattttcttccgcaattccgatattgaatcctgaggtttgtgaaacataatctatcgccgctcctgattgtttcaaaatacggtctttcccataactgctgtgaatcagcagccaggaagaggctttaacattcggaataatattctgtaaaataatggaaacattagaaaaatgcttcttttcctgcgcgtaagaaaatgttcccaaaaacaaaaaaccgaatacccagaattttcttatcaatgttatcatagttatagaacgagaaaaaaaaggaattattttacatgaatttatctcctttcttcaggtttttaaggtctaaaacatagtcttttatgagctgatcgtgatctctcgggcagattaaaagagctttatcggtatctacaatgatgtaattttccaatccgtcgataaccactgctttattgttattcttcatacggattacgtttccttttgcgttgtaggtaagaatcggctgttttgtttttaccgcattcagattttcgtctttatccgcattttcataaacggaagtccatgttcccagatcgctccagcctaaatctgcgggaattacataaacgttctgtgctttttctaaaattccgttatcaatggatattttctgtactttaggatagatcagttcaatacagcttttttcgctgtctgcgttgtattcgcaagccataaaatgctgtgtcatttccggaagatacatttcaaaggcatgatgaatactttttacgttccagataaaaattcctgcattccaaaggaaatcaccgctttccagaaagcttttggcaatctcaagaatcggtttttccgtaaaggtttttactttataataatcagaatcatgcttatcaacaaactgaatatagccatatcctgtgtcgggtcttgttggtgtaattcccaacgttaccagatattcgttctttgcagcaatttcaaaagccagttctacttttttcagaaaagtttcttcttttaaaattaaatgatctgcaggaagtacaatcatggttgcatccggatctgtttccgcgattttattcgccatataaagattgcacggagccgtatttttaagcaaaggttcgcctacaatattttcctgcggaacttccggcaactgctgatgtgaaagctctacatactctttattcgtaatcacaaatatattttcgttaggaataattctgctgatcctgtcataggtctgctgaatcatggtgcgtcccactcctaaaatatcctgaaactgtttcggaaatttctgcgtactcataggccagaatctgcttccgattccacctgccataatgacgcaatatctgtttgattttgacattcttatgtgtatttttctacccttgccaatggtttgaaagaatactttcttcctgtagccaagtttttacaaagatagttttttttaattagaccttctaaaaggtacttttcgtttcggtagataaagaagtctcctttctgaagcgtttcaataaaaacaagcgtatcgtcctgtttttcagaatgaaaatattttaccaaatccggactcgccatgaaattggctttcggagatttcgaaaatttaacaatgaccggtcttaaatcttcttcatatacctcaagactctgcaaaagcatctgccggaaagtttctttccattcgtttccgtgaggagaaattcttctgccgtacttctcaaaggcgataagatgcgccaattcatgggtcaatacgaagaaaaacaattgcggaaccaatgttgaattaatcgtaatctcatgagaatgatccgaaagtttacgataatctcccagtttggaattcctgttgcgtgtaacttttatataaatataatagtctgcaaaccagatttttaaatattgaagcgtattttgtggtaaatatttttctaatgactgaatagacattttacaaacttaatggaattcctgcatagaaattcaacaatttaagactgaaaacataattatattttgcctgagctacagaaccctgtgcgttagcataattatttcttgcaatatttacatcataaatggtagatcttcccgctgcataacttttatctgcaaactccaatgcaagtttggtgcttttctctgcctgaagcgatgagagatagatttcgtaattggcatccacatcaaactgcgctttctgaacattctgtcttacgatctgtttctgctgttctaaagttactttagccagactttcattcagtttagactgttctacctgaagttttgtaattcctttattaaaaatagggatattgacagaaagagccgcctgttgtccgaaattgtctttatattgagaaaagaatccctgttctttcacatagaaaagagcggaacctacattatctgtatttaaaaggttattgtagaaagatcctattcctgcacttgccgtaacagttggccagaaagccgttttggaaacttcggtctgcgcctgcgctgcttttatcctgctctccgctgcttttacctgcggctgagtctcgtaagccgtcgttaaaacctcatctacagattttagctgaggagcaagctgatcgggaacatccacatcttccacatcaaaatctttatattcctgaagctgtaaaagctgtgctaaagcaaataagcttcttcctacattaatttcagcggtcttcaggttttgtttttctcttgccagtcctgcctctgcttctgctaaaaccgtttgtgcggttgttcctatttctgtagtaatttttgatctgtcatattgtttctgagcattttcaacagccgcctgagaaatttttacaatttctttattcagtaacgttgttaaatactgctgtgcaatctgaagagaaatatcgtttttaatggtttcaatatcatactgacttgcttctacatcgaattctgtttttctgatggttttttcaagtctgccgttattgtataccaaaatatctgctcccagatttgcactgttactgaatctgtcgtttcttaaacttcccgtcccgaaagaggtttgcccgaaactcaccgtatttcccacagaaccggaaacagacggaagatagtttttcttggcaattttcagattcagatcctgagactgtttcgaatattcattttggatcacctgaagattatgtttggttgcataatccacacattctctcaaagaccattttttctgggcattgaccgccagacaagataatcccaaaataatagtcaaaacctttttcatactctatatatttttccctattagacgaagtaaatataaaaaagttacagttttaatatttctttttaaaaaacttttgagaattttgcattatgacaaatgaacaatatcaggaagcggtagaatggttgttcgtacaggctcctaattatcagatagacgggcagaaagcgtataagcctggattaggcaatattataaaactttgcgatttttttggaaatcctcaggaaaagataaaatgcgttcatataggcggaaccaatggaaaaggctcttccagcaatatgctggcttctgttcttcaggaatcgggatataaaatcgggctgtacaattcgcctcacctgatcgactttacagaacgaattaaggtaaacggtaataattgtgataaagaatttgtgtatcattttattcagaaattgaaaaatcttccggaagatattcagccttctttttttgaatttaccaccattatggcttttgaatatttctatcagcaagatgtagatattgcgattattgaagttggtcttggaggaagattagattctaccaatatcatcaagccattggtttcagctattacgaatgtacagctagatcatcagaatattctgggagacactattgaagaaattgcaggagaaaaagcaggaattgtaaaaacgggagttcctattatttccggagatgaaaacgaagcagtaaaaaatatcattaaaaataaagcggaaaaagaaaatgcagcttttgttgatgctactctactaaaaacagatttaaaatctgacttaaagggaaattatcaagagaaaaacattaaggttgttttatgtttagttgatgaattaagaaaattaaattacaacatttccgatgaaaatattaaaaaaggacttcttcatgttcatcaaaacacaggatttatcggtcgatggtttcagttttcagaaaatccattgacgatttgcgacacagggcacaatcaggcaggtctggaatatgttttttcacaattaaattccatcaataagcacaaacatattattttaggcttcgtgaatgacaaaaaaatagatgaagtcatgaaaattttacctgataattctcagtactattttgcaaaaccagccatccatcgcggaagacaccctgaagattatgaaaatttactagttgatgcgaaaattttttacaaaatttttgattcggtacaggaagcgtatctttctgcaaaagaggaatgtacaaatgaagaaatgatttttatcggcggaagcaactttgtagtgggagaatttttagaaaaaaatttggagatttctaaataagtcgtatatttgcaccactctaatcgaggaaacaacgataaagagggttcttagctcagttggttcagagcatctggtttacacccagagggtcgggggttcgaatccctcaggacccacagaaaaggaaacgaaacctttcaaaaaaattcgggttcttagctcagttggttcagagcatctggtttacacccagagggtcgggggttcgaatccctcaggacccacagaaatctctcttttttaagggagatttttttgttttatatcttctgtgtaagactgattaaaaaaagcctccggaatcgggaggctctatttataaaatcttttccactattttctgcacatgcaactcctcaagacaagcccagtctccacgatagcattctttatccccaaaaacagaacaaggtctgcaggtaaggtctttcacctgaaccacatcttcttctctttgtccgaatcctaaaaaccctgcaaaaggatgagtctgcccccacacggaaacacatctcgttcccatgagacttgccagatgcatattggcagaatccatagagatcattaattctaatgtggaaattttatttaactcctcctgaaggcttaattttcccgctaaactgaaggtattcgggatttccctctcccactgttccagtgtttcagcttcagattttccgcctccgaaaaaataaattgtatgtttttgtgctaaaattttcgccagctcaaaagacttttccagaggaagcatttttccgcgatgctgtgcgaaaggcgcaaatcctattcctgatttctcaatagaaagaggtcttaatgtatgggaaagttcaacgctaaagcccatttcccgaaaaacatctgcataacgttctaccgttttttttaattgggttttatttaaattccagacattcgtgaggtcttctttttcttcttttcccttattgattttgaatactttaagcccttttcttctgtaaattttgtcgagaatcttcgtgcggattacatcatgaagattcgcgataaaatccggatgaaactctttaatcaattcattggcaagacgtctcaatccgaatattcctttatagtcatcaaggttaactcctttgaatataacgttcggaatatcagcaaataaagcttcaaaattctttcgggaaaccatcacaatttccacatcaggattttgctccagaaactcacggaaaacaggagctgtcatcgcgacatctccaaaagcagaaaaacggtatgctaaaattcgggtcacagattaagacttcagttgatatgcgactgcgtaaaatttaatctgcttcgtcattgccatcaaaccattggctctggaaggcgaaagaaactcctgcagaccaatttcagcaataaattcgaaatcagaatccagaatttcctgtgtagagtgaccgctgtagatgcttaccagaagcgaaacaatacctttcggcaaaatcccgtcagaatctgcctcgaaaaacaattttccctctttaaattcggcatcaatccaaactttactctgacagcctttgatcaggttttcttccgtttttttgtcttcagaaagccctttcagctcttttccaagatcgataatatattcgtatttctgctcccagtcttcaagaaaagcaaattcgtcgatgatttcctgctgtttttctttaatagtcattgtaaaccgatttctttctgcaaagatagccaaatttaaaagatgttgaatttatttgaagctattcccgctttctgctgtatcttttttacctgttcttatcccatgcaaaaaaaggatgtcgcggcaatcggggctaaaattgcagtcatcaatatcagatatttcgatttaaatttaagaagatgccttttcaaaaacctgcaacagttttatttcttcgttttcccagcatagaagatgagcagctttttcaagttcaggaagataattttgccttcctttatctaaaaccgattgaatggcaagcgcaatatgttccggctgatgatcttttataatttcaccaatgtcaaattgtcttttaatattctgcatttcaggaagatttgacagaatcagaggaactcttgcttgaatacagtctaaaaccttattgggcaaagaataaaaatagctttctcccccattctcttcaatgctcattccgcagtctgcagttaaagtgatctttcgcagatcttccggtaataattttcctaaaaataaaaccttatcctgaagattttctctgataaccaatttttcgtattcttttttcatcggtccgtctcctgcaattttaaagataacatcatccaaatgtttcattgccaaaattgccttatcaatcccgcgaaaaggattaatgactccctgataaagaatcgttttcggacggttttccggaatttcaccttcaaaaacaaattttctgggtgcattttgaacaacaacaggctgaattccgtagtgggatttaaaccaattggcgtatccggaacttgctgtaatcatcaatttcagatcaggaatcagctttctttcaagatgtcgccacaatttttgtgacattttgccctgaatcgcaggcatttcggaaaaaatttcatgactgtcaaaaaccaacggaatatttaattttttagcaattaaataattaggcagtaaagaatccagatcatttgcatgaagaatcgtgtttttatccgtttttttctttaattccctgtacaatttccagttgaattcgaaataagccgttttcaagctctttgaaattaatttaatccttgaaaaagaataaggtctggacatttctccggctccgttccagtcattccctatcagatcaatctcatagcctttttcatgtaaagtcctgcaaaccttttcgatacgctgatctgtatacaaattactgaacgcggaagtaatgatttttcttcgctgcattatttttctttcgtcatcagaagatgataaatttgtataaaacagattaatccgttcggaataattaccggccaaagcataccgctgaaaattccatagataacaaaacagatacagccgatcatattaacgatccttattttcctgatgtctttcaatataaagctcagtacgatgaaaagtgacgcggaatatcctatgtaagtggctgtttcaggattcatgagaaatttttaaggacaacaaacttaatcattttcaataagataataaaattttttctgccataaagtcatttattgctttttggtaaaatatttgtaatttagataatgaataaatggcaatgttgctattattctaatgagatatattatggattataagttttcacaaggtttgagccaggtgttcaaacaaagcaagagcgaagcgaaaaggctcaaaagtgaatttcttaatacagaacatctacttttaggtattataaaaacagaaaactctgcaaaagaaatccttcaaaaccttaatgcggatctaacacaaatcagaagaaaaattgaaactttaaatacagcaagtctaaatcctatttctgaggaggttaccaatatttctttcacgaaaatggcagatcatgccatcaaacgtgctgaacttgaatgcagacaatacaaaagcaatgagattaataccgttcatctgcttttaggcattctttacaaatatgaggaccctacttcaaacatattaggagcttacgacatcgactatgaaggagtttcaaaagagtatcagactatgttgaaaaattccggacaggctccacagatgagtgcttacgacgacgatgacgaaagagaagattttgagcaaatgagaaagcctacaggaaatttaggctctgctaaaagtaaaacaccaacacttgataacttcggtagagacttaacttctctagcaagagacgggaaattagatcctgttatcggtcgtgaaaaagaaattgagagagtttctcagatcctttcaagaagaaagaaaaacaatcctttgctaatcggggaaccgggagttggtaaatctgccatcgcggaaggtctggctttaagaattcagcagaaaaaagtttccagagtcctttatggaaaacgagtgatcactctggatcttgcaagtttggttgccggaacaaaataccgcggtcagtttgaggaaagaatgaaagcgatcatgacggagctggagaaaaacagagacgtgatcttattcattgatgagcttcacaccattgttggtgcgggtagttcaacaggaagcttagatgcttccaatatgttcaaaccggctttggcaagaggtgaaattcagtgcattggagctactactctggatgaataccgtcagtacattgaaaaggacggcgcattagaaagaagattccagaaagtaatggtggaacctacttctattgacgaaaccgttcagattttaaatcagatcaaagataaatacgaagagcaccacaatgtaatttatacacctgaagcaattgcagcgtgtgtaaatcttacatcaagatatattacagaccgttttctaccggacaaagcgattgatgcaatggacgaagcaggatcgcgagtgtatattaaaaacatgaaagttcctaccgaaatcatcgattttgaaaagaaaatcgatgagatcaaggaattaaaacaaaaagcagtaaaagcgcaggattatctggaagcgagaaaactgaaagatgaagaagaaagacttcagatggaactgaattctgctcaggataaatgggacaaagatgtaaaagagaaaaaagaaaccgtaacagaagaaaatgtagcggaagtagtttctatgatgagcggtgttcctgttaccaaagttggtaaaaacgagcttgataaacttgccggaatggatggaaacctgaacggaaaagtaatcggtcaggaagatgcggtgaaaaaagttgtgaaagcaattcaaagaaacagagccggtcttaaagatccgaaccgtccaatcggtacattcattttcttaggaacaacaggggttggtaaaaccgagctggctaaagtaatggcaagagaactcttcgaatctgatgaatctttgatcagaattgatatgagtgagtatatggagaaatttgccgtttcaagattggtaggtgcgcctccgggatacgttggatatgaggaaggcggacaattaacagaagcggtaagaagaaaaccttatgctgtggttcttttggatgagattgaaaaagcgcatcctgatgtattcaatatcctgttgcaaatcttagatgaaggtcacgttacagacagtttaggaagaaaaatcgatttcagaaatacgattatcattcttacttcaaacatcggtacaagagatcttaaagattttggtgatggtgtcggattcggaacttctgcgaaaaaatcaacaacagattccagagcaagaagtacgattgaaaatgcgcttaaaaaagcattctcaccagaattcctgaacagaattgatgatatcgttatttttaattctcttgaaaaagaagacataaagaaaatcattgatcttgaactgaacaaattgtattcaagacttgaaaaattaggatataaagtagaactgacagaagaagcaaaagactttatttctgaaaaaggatgggataaggatttcggagcaagaccattaaaaagagcgatccagaaatacattgaagatttattggcagaaatgctcgtaaacaaacaattaacagaaggagaaaccgtagttcttgatctgaatgaagcaaaagacggtttggcagggaaaacttcaaagtcaaagaaatctgccgcagagaagtcttcttaatcgtaagtacataatttaatcataccaaaaagcatcgggagttttccgatgcttttttatttgttagtttttattctaattctgtagtgcttattagttaaaaaatttgtccgtttgcgtttaaattttattcgcgcagattttgcagatgtcgctgatctgaatgtagtgatcttaaaccgcacctttcagaatacaaactaaagccccaccacaaatcctatattcggaactaaaccacttgagaaaatactcgaattttctttccataaaacattatacatcaaaccaagctgtaaataagaattattcccgattctctgcatataaccgccgccaagatacaatgcatcttcgtctgcattagctttaaaatcataaaatttgtctttataattgatgaaataatgctgataattggcacttacgaaaaatgttcttgcgatataatagttcagaaaaggaccaactccgaacatcgtggaactgtaagcatttgatttctgccaggaaacacttcccaaaactccgccttcaagatcatccgtaagtcggtaacccactcttggagccgctgaaagagtaaagtaattgttgcttccgaaaccaaagccgattccgcctccgaaagtccagcgattattattttcaggagaagcatttacagcaacctgagaaaacagcaagccggaaaatgaaacacataaagaaataatcagttttttcatatttaaattgtttttatcgatgtctaaaattatcacttttttacgaatctttttaattgtatttttgcagcgtcaaactaagaactcccgttaagagtttcgtaaaattgaaataacatgaaagtagtagtaggattatccggaggagtggattccagtgttacagcgtatctgctgcaacagcaaggtcatgaagtggtggctttgtttatgagaaactggaacgatgcttcggtaacgctggaagatgaatgtccgtggatcgaggacagcaatgatgccttaatggtggctcaaaaacttggaattccgtttcaggtgattgatatgagcgatctgtacaaggaaagaatcgtagattatatgttcgacgaatatcagaaaggaagaactccgaatcctgatgttctctgcaacagagaagtaaaattcgatgtttttatgaagacggcaatgtctctgggcgcagataaagtcgcaaccggacattacgcaagagtagattcaacgatcgatgaaaacggaaaggaaattttccatcttcttgccggaaaagataacaataaagaccagtcctacttcttatgtcagctaagtcaggatcagttgtccaaagcattatttccgattggagagcttacaaaacctcaggttagagaaattgccaaagaaattggtttggtaacagcagataaaaaagattctcagggattgtgttttatcggaaaagtaagtttaccgcaattcttacagcagcaattagttccaaaagaaggcgaaatcgtagaaattttcaaagattctcccctttttgctgaagaaatgcctgaattttcatcaaaacaggaagaattagaatacctcagccgaaaaatcaattacaaaaagacagacggtaaagtcataggaaaacatcagggagctcagtttttcacgatcggacaaagcaaagggttaggaatcggcggacataaagaaagctgttttatcatctccagagacatggaaaacaatattcttttcgtgggagaaggacatcagtttccgggactgcttaaaagagccttaaaaattgataattctgaactgcactgggttcgtgaagatctgagactgaaaaacggagaatcgatggaagtaatggcaagattcagatacagacagccattgcagaaagcaactttatatcagtttgaagaaggattctatgttgaatttgaagaaccgcagtcagcgattgcagaagggcagtttgcatcgtggtacatcggcgaagagctgatcggaagcggagttatttcctaaaataaatcttatctaaataataatcccgaagcgttatgtttcgggttttttgtttgaaaaaacatcaattcctatttcattttatggttcacatagaacaaattaagaaacacagatacaataatttccaatattaaaatcattattaaatagccgattggttttcctaagaaaattcctttcgctaattttaccactcccaatagaaatatagaaatcaggaagtaaaaagttgttctcgaaatggtttctccaaaaaatttcagcgcaaaaacagaggcataaaatccaaggacgagaatgaaatagaatttgagaaaatagtgtcctttcaaagaaatcggatctaaagtatggttgattgcaataagccagatcagacttatgagcaccggaattgtgtggataaggatttttttcatgtggtttgtatttcggttaatctcctccacctccgcaaccaccgcatccgcttccacaactgcttccgcaggaactgccgcaaccggaacctccatcgctgtgtgaactgttgcttccacaggtgtagaaaaagccgccatcacttccgttatctctattacctttattggattcgttatttgtactgaatgcttttataatcattacgatcagcacgaagacgaaaataagagtcaggaatattccccaacctccgttattgttttccatacaggaataaatcaccaaagaaatgcttaaaagaataaaaattttaacaaaaggcgatatttttctcttttttgaaggaatttgagtcgatttccagatatctttcggcggttcctgctcaaatattttctcataattttctaaagtttccgcaaaccagcttttatgtttttcattttcgttttctccgccttgtgatggttgatgatgcagtttctgctgcaaaacttccggacagaattcttcccagtagttttgtgtgtaaatgagatgcatatgccatactttgtctataatttcgcttggtgaagcaccatttggaagtttacagcagaggtagacgaattttttgtattcatcaatcgcttttcgggtaaatgtttctgtccagttttcttctttcgccagtttctttgagaaaggaaaatcggcagcacattcatccaatgagaattcctgaagcctgttccagagaggatcattttgtaatacgatttttgtttccattgttttaacttttaatttctactcaaatatcgttggatgttgagatataaaagtcttgtaacagtctcatttggttttaaaattatcttatattagtcttataaattgaaagatgaaaaaagaagatatactacacatagaaaaactgatgaattttctggcgttgcatttcctgaagaaacatcattgggaagatgtctccaaaaccgaatggtcttacatcgttgcagaacttaatgatctgattattcaggaaaattcagagaacagcagtaaaaaaagcccggatattttaggttccaattacctttatgagcatttgattatcaacaaattaaaaaagtattatcagaatgaaaatgcagtattaagcaagcctaatcttgctaaactcagcatgatcgtaaaagtcttaggatattccagttatatcgattttatcaattccaatacggaatcattcaattttaatgatctgagaattgatatgaataatgtaaagccaaacaccgctttgctggaccgtcttgtcggctgttggtattcctacaacagaaatcttccggaaaatcctttacaggcaaaagaagaccggatctggcgttctgcaacggaaatctacaaatctgaaacttccggagaatatttcgttgaaagaagcggcggcgaccgtcataaatattttggaaaaataacagcctattccgattatgtctttatcatcatgaacagcaatacgttcatccggcagcgtcattttatctcaagaataaaagatatcaaggaaaagctgaaaaatccagagtataagctccatgagttgcattttataagtacgtgtatcagttttaatcaggaaccgattgctcttttcgaaattttccagaaagcagaccggaaaacctttatttcagactccatcagttttccgatcgacagtgatgaaattccgaaatcgattatcaaacagcttgaagacacggaatctaaccgtatcgattacaggtagttgattttggttgatggattctggttcagagttttttgttttgggttttaacttaccaaccagtctttaaaatcttttacacggtcgcggcttacggtaatttcttcctgtggctgaaattccagttcaaccttgtaattaggagaagtgtggatgtttttaataaaatctgaactgataataaactgccggtttacgcggaagaatttcttttcatccagcacctcttccagttcgtccagtgtgaaatccgaaggatacgttctttcctgagtctgtaaataaacaattttattttcgctgaaaaaacagcttacttcaagcgtctgtacgatcttcaggttgtagcctatcttcaccagaattctggaaagcgtacttttctcctttttaattaactgcttaatttcatgcgaattaacggaattatctgaaggaataaatgatttgaatttctcaatcgcgccggcaagatcttcatctaaaatcggcttcagaagataatcgatgctgttcagtttgaatgcttttaaggtatactgatcaaaagctgtcgtgtaaatgataaatccttttgtcggaactttttcaaaaatatcgaaagacagaccgtctcccagaacaatgtctgaaaagatgagctgcggatgttcattttccgaaaaccactccactccttcttctacggattctattttcgcaacaatctctatttcaggaaattcgttaagcattctttccagtttccttgaagcgggtttttcgtcttcgataatgacagtcttgatcattgagttcctgttttagttttataatttcgaaataaaagtaatcaaaaattgtcagttttaaaacttaagcggttctttcgattttttcatttctttttccatcacttctctttcccattcagaatccagaaggaagagttttacggcttttacggttaaaataattccccagatggtaagaatgattgatccgttccacaatgaaaaattaaatattcctttttctaaaatatcgtctccgaaaataattactgccacgatcccaaaccataaaaggcttttgtagaattttttaagatcgtttactctttcctgtgcctgattgtaattcatgataatctatttttaaagttaaaattgaatgttggttataaagatttagtatttcttctttcttcgtccatcagttgttttatttttctttcttcccagtctcttccaatcccgaaagtactcgctgcgtgtgctgcaagacctaatccccatcctaacatcggccagaaaaaccaaagatattgtggtgatgttaaaagattcagcacagctaaaaatgaaatcacaaggcaatatgaagtaaggtttccgtaaaaacctttcagttcttttactcttcttgatgctttttcgtacgctaattcttctttgttggtgtaagtttccatattttttatttttaaagattaattgtttgtttttgttgagacaaatgtaggtcggaaaacagcctcaaatcaattttaacttaccgaaccgtagattatgcatcctgaattgtaaaaatcctgactcaacggagaatcgggattttttgattttgatgtttttagttgtttgattaggaaagctgcgaaagtatgattcgcttttaaatgaaatttgtaatcaatttctatatcaaatgattattaaactgactggatttctcctttgtcgaaatgacagtgcaaggatttttaattatggagttaagtgtttgctcctttaggagcagaatctgtgtagaaataagaataaatccgtcaatcaatccataggattggtatcttaaatacgataaattttctaaagatagcgttcctacggaacgcagaacgccttacgaatatgctgtttacacagataaaactctatagagttttctaccattttaccttaaacaactttcctgattttgttgattaaaaataagtgaataagtaacttaataaacaaaaggaatcagctttttggtttttctccggtaatccagatactcttctccgaactgctcgattaaagccttttcttcgacattaattctgtagctgaatgcaatgaaaggaatcaggaaggctaaaaccaatgagagccagttgtttaaatacaatcccaaacccaacgaagtaagcaatgaaaaagtgtaagacggatgtctgagatatttgtaaaacccttctttcttaattttatgatcttctttaatcgtaacatccaccgtaaaatattttcccagagaacgaatgatgatgaaccttaaaataattccgatccatatcagaacggctcctgaataatagatccagacctcatcagaaatgggaaaccgtgtaacgtaagaaaccgtaacggcacttacaattgaaagcggaatggcaatccataacagatttagagtagatttatcctttttattgtctttttcaccggatttcaggatgtttttgtacaaaaattcgcttaaaaaccacgccaccatagaaatggcgaaaagaatctgtaaagttttcatatcaaacggtatttagaagtgatgaacaatttatctgccgtttttttcgttttccatcagttctttaatttttctttcttcccatttatttcccagcataaaccccggaataaacgttctcattgccgaaatggcaactccgattccccagaaaaatggaagtgcgaaaaatttcaattgaaaaatagattcattgggttttaattctgtgtaattcagatataaaataaaaagatttaccgcaatataaatgaagacggaaaagtagaatcttttgattcttttcacttgtctttccgcttctttgtatctgaaatcgcttttgcttatattttccatgatgcttattttaatgttctgttttgtttttctaaaatttccctgatctttctttcttcccagcctcttccaatagcaaaaacgctcattccgtgggcaacaagcccgattccccaacctaacatcggccagtaaaaccacagacgatccgggctggtgatgagatttaaaatgattaaaaaaggaatgatgatgcagtaagaaatgagatttccgtagaagctttttatttcttttacccgtttgtgcgcgcgttcgtaagattcatttttagtttcggctatttcacttacaacatccggtttagaagaaagtaccggaagttttactttaaaataatcttcagatttttctataaaaacatttcttttagtgagtaaagaatagcgctgtacaatatttgcaagaccgatccctgaactttctttgatctgctctcttacctgtaaattattttcaatgcacaacgtatcattttcagagaaaattttaatgatgagaggtttggaagaagtggcaaaattatgcttgatgcagttctccagaagaagctgtaaagacagcggaacgacaaatcttcggtaatcttctttttttacttcaaaatcaaaatctacgctgtcctcgaatctggttttcagcaattcgcaataggttttggcaaattccagctcatcttccaccgttaccagttctttgtctttctgttctaaaacatatctgtaaatctttgacattgaggcagtaaacttctgcgcctgtttcggattttcatcaattaatgaacttaaaacattcagagaattgaataaaaaatgtggatctaactggtttttaagactttcaaactgtgcattggcagatttggcaattaacttctgctcaacaacttcttttttggacgttttccgaagttcttccatgaaacctttggcatgaagaaaagctgaaatgagcaaggcaacattaatcatgaaccagttggaaacattgtacttgccggaaaagaattcttcggcggttgctgccttctggatgactacgaaattcatataattacagaaatataccaaaactgtgtttgcgacaagaatggaaacaatgcttatgatcgctcttgttctggtggtttcagaccaagggaatttcctgttgagaaaatcgttgatgatgccgtttccaattcccaaaacgaatgaatacatggtggataccaaaagagtgatggcaaaattttccagtgttttttcatcattaaaaacaaaaaagaaaaaaaatgttgttgccagtgatatccagagtaatatgatgatgcttttgtatttcattgtgagttttcttggttcaaaattaggctttaataaaagtattaaaaattattttttgccgaaccgtcattttttatgactgaaacgcaaaataaaaccttccgcgaagaaggttattatttaaattttaaatcacaaaagacaaaaagacaatgttaaagtgaatttctataataatcaaagcgctcaaaagaataaaaatcaaagatttttaaaaactgttatgttcttttattcctgggcttattaactttttttgattgtccgtttattaacctaaagcttcgacaggctcagcttgacatcgctaaaaatcaagcgtttagtattagaggtgtcacactgagcttgtcgaagtgcctgttataaataattgattttaatatcagtgcatagtaataggttgtttaacggatattcaataactttttaaaatgcattaaaatcttttgtggcttttgtagttaaataaaagtttaaacagccttttcacattatttcgcagctccgcttacaaaatattcagcttctgcttttccccagttcggagcaatgttggattttggagtgtaggttttaaacttggttaaagcatctttaaactgttccatcccttttgttttgcttcctccaaactgctccggagtgaagtaagtgtcttccgcttttatcagggcaattcttgggttttcgggatccaggttttccgcttttttcaattcttctatggctttcattccgtctgtcatgtatctttcggtaggattttccatcattttaagagaatacgacatttttctcaacaggtgaatttctgcattgtcttttccggcaatactttctgcctgatcaagatatttttctgcaatatttgcctgtgttgaaagctcagacattttaccttctctcattaacattcttcccttttgaatgtatgaaaacgcggcataatatgcaggaagccattctttggtttcttttttcccgattctgtcgaagtcattcgccagagtctggaattcgtcaagagatttacagttttcaattttggcaattttatcagacattattttttcataatctgtctgggcaaaagcggttaaactcatcagacttaaagcaaaggttaatagatattttttcatgttttctaatttttttaaattaatttttgttttgactaaagatatatttttaattgaattgaaattacttttttacagattattattgatggcatcctgcgttttgtcgactccgaagctgatgaatgcgcctacaaaaacaaaggtatttacaggcggaacaaccgctgaactccttgatccgtccattgagaaattgtaaccgtatacatttttcgatcctaaaatattggatacactcagtaccagaaccgtaaatgtttttgaatctttctttcctaaattcggaagataatttacactgaaatttaacgcgttataatctttcagactgccttcgtgtcttacgaaatatttctgttcaccattcacatcctgtgttgcgatgtcgtaatacggacggccttttgcgtaggtgtaggaaatattgaagcctgttttccattccggaacaaatcttttggctactgcagaaagggtgtgttcggaagcgaaattcggttttaaactcatcggataattcataaaatctctttttgaatctaaaaatgaatagctgatccagtaatcgatattgtcgaatgtttttttgtctctccagaataattccagtccttttgcataaccaaaaccgctgttgttatccgctgtctgaacaaattggttctgtccgtcgatgtattgtaagttttttaccttcagaagatcatcatattttttgtaaaaagcttcaaatctcaggcttcttccttccgttgttctctgcacctgaaagatataatgctgtgatttctggaagtctaaatttgcaggatcgttgatgtatctgctttcgggattctgataaaaaattccgtaagcgaatgaagttgtccagtctttggcaagacgatacgctaaagccagacgcggtgcaatattgtttttcccaagataggaagaatgctctgctctcactcctatttttgctgataactgattgctgaatcctaaatctgtttctgcaaatgctgaagagatcaggtctttgtagtttttcgttacaaaatcgttaaaatttaatttttcgctggtactgttgaattcaaaacctcctcgtaacgcactgattttatttatttttctttctaaaacggtcttgaaattgatgtaatttccgtcattcagaagttttgtggttccggtttgggtttcatctttttgggttgaaaaatcaaggtctgactgattataggaataagatgctcctgcattcagtaaatattttccgaatttctgcttgaaagagagattatgataggtattttttcctttcagtttcacgagagacaggtcataatcttccggttccagacttggagtctgcactgccattctgttggaatcgtattttccgtaatatttgaaaaatccgcctgattttgttttaaatctgaaattcagatcgctgtttatactttgtggagcttcggaaaaattggtgttaaaattgaaaatttcctgcatcagttttaagttggaatatccaagactggctccgtaagaatagtttttattattgcccaatctctgaaatcctgcgtttaaaaagatcggagaaacaccgaaatcgtaagaaatctgatccggaagatctatactttccagcatcagtgcccccgaaagagcctgaccgtacaatgcagaatatccgccgcttgagaaaacattgcctttgaaaagagaagtattgaaacggtctcttcctgcaattcccggaactgaattggagaaataattgttgattaagcttccatccataaaaattttggattccgttcctgttccaccacggatgaaaagaccttctgtttcgcctactttctgaactcccggaagatacgttaatgccgatgtaatctgtccgtccgctccggctgttgtgtagatatcaattggagtaagtaaagctgttgctctttttttgtcgcttgcttcgatagaacccgccgaaacgactaccgcatcaatttcattaatttgctctttcagttctgcatttacagaaatttcctgattttcaataacaatcggtttttcaacatcaatatatttcggatgggtaaaaactaaaacacggctgcctttttctgtggtttcaaaagagaagtttccgttggaatcggttgtggctccgtcgtaagtatttttcagggtaacatttacttctcctactcctctatttttgtacgtaactcttcccgaaattctggtttgagcaaaacttagtgcaaatgataaaaaagtggtaagaaataataattttgttttcatagctgttttatttcgattcaaaagtataacgaattttcgctgcttttaaatttttgttgctgagtggtagattttggaatctgaatggttgtttttgattttttggtgctgaaaatttactttgtaaaatatattgaccaccccgtcaaaaattctttgaattttcgccacccctccaaaggaggggaattttactactaatcgtattattaaactgcgctgattttaattgatgggaatgcagaaatcgacgagcatttttccttccggatgttctttgtaattggtgtggtagatttcgaaaggaaaagctttccttacagaataatggttttcattcatccaaagaaaaagggaaacccaacattgttcaaagtcatttaaggtgacttctccgcttccgacaatgaatttcccggcttcaagggtttctggaaaaattaggttttcctgctgttgtaatttttcctccaagagcatacaggcgtgaatttgtactttatcgggcggagtaactttaaagctgtcgtgataaacggaaatcatttttagattctctcggggaaatagctttttctcggttgcccaatctattaaggtgttgtaagaggattcaacattcgcaattccaaggctcatcactgctgcaagattcatctccggaagttcggtaactttaatttttaaattcattgatgtccattttaacaggttttctatattgcaaatgtattgttggaaaaccgtatctatttgtccgttcttgctttgttttaattgaattttatgaaatttttcgggagccgattttctgaattctgagggagattttccgtaatgctttttaaatgatttgttaaatgccgaatggttggagaaacctaattcaagataaatattttttacacttatgtttttttttaaggctaaataaaaggcgcttttttcaattcttttgcggatgatatagctttgaagggtttcattggtcatcagtctgaaaatcctgtgaaaatgaaagggagaatacgctgcaacttccgcaactttttctaaagaaagttcggtatcgagattgttatcaatgtactgaatagctttcaccattctttttctgtattcttccaatttaaaaacatttcctacaaaggtatcgacatcggatgaaattggtttgtcttttattgctatttatgaaaaaagacaggaatcgtaatgcgctttgaaaaatgttgtctaactttatccgacaatcactttaaatcatttaaaaatgaaaggtacaacattagcattattggcaggatgtgcgttttttgcggtttcatgcggaacaacaaatacgtatcagatcctttccaaaagcaacacacaaacgggcggaacggcaaagtttacccaaaaaggagatgaagttgttatgaaactggatgttacgaatcttactccgggaattcacgcggtacacatccatgaaaaaggagactgctccgcagcggacggaacttctacgggaggacactggaatccatctaaaaacgatcacggaaaatggggtgcagagcatttccacatgggagatatcggaaatcttgttgccaatcaggatggtgtggcaacgctgacttttaaaacgaataaatggtgtctcggatgttctgatgagtctaaaaatatcatcggaaaaggaatgattattcacgccgcagccgacgattttcatacgcagccaaccggaaatgcaggaggaagagtgggttgtgtggagattaagtagtttttcgcttctatcaataaaaaataccgctacttttcgttagcggtatttttgtattttatctgaatattaagattttacactcatgtctgtaatgatgttcattgcttcctgaaggtaaaggtcttttttaagatttttgatccagatttcagattttttcttgaaggcttcatcttttttctctctttcaatttcattctgatacaaagtaaactgaaggccgttttcaaattttgtcagagacttgaacttctcgatctgtgcttttctctgcttcatcagttcattgaatttattgatattcaaagtaatggtctcttctttatccagctgttctctccactgagcggattctaacagcaactgatattttgcatttttagccattctgtcgttgcttgctttttccaacgcctgaatgttgaaataattaagcttctggaagcttgtggaaggaattttatcccaagccagagcataatcatcatatctttctcctacttcagcatatgtgaaaagatctttcatctgaatatctgaaacaattccttttctctgggtagattctcctgtaattctgtagaatttctggatggtcagttttaaagatccgaaatcgtcttctgtgtttaagaatctgttcagatctacaaaagtctgcactgttccttttccgaatgattgaggcgaaccgataatcattgctcttccgtaatcctgcatcacacctgctaaaatttctgaagctgaagcggaaagctcgttctgcataatcaccaatggtcctgtccagatcggagtttcatttttattttttaaggtctgaattttcccgtttccatcttttacctgaacataaggtcctgcctgcatgaaaagtcccatgatgtctcccacttccgttaaagaacctcctccgttgtttctaagatccagaacaattccttctattccctgagctttaagcttgatgatttcgtttttaatatcatcagaagcatttcttccgttggggttttcaaaatctgcgttgaagcttggtaaattgatgaatccgtattttttaccattcggagagttgataataatacttcttgcgaaagtatcttcaatggcaacttcttcacgaatcatggtaacttcttttattgttccgtcttttttctgaacggttaaagtaaccggagttcctttttctcctctgatgagtcttaccgcttcatcagaaagcattcccacaacatttacggcatcttctttcggtttagattttacttttaaaattttatctccttcggaaagctgtttggatttccacgccggagcgcctatcgttaaagctcccagataaagatttccttttttctcctgaataatggctccgattccgattacttttcctgtgaaattggtgtcgaaatcttctttatcctttggagaataatagttggtatgtggatcgaaaacttccgtataagcattcatgtatactgtaaaccaatccattttctttctctttttgaatctcgtaaaggtttcttttacaagatctttcacctcatcggttgcttttttaagcttctgatccggcgcaagaggctgatattttatggtatctttcaggttgtatttctgtacagagtcttttttctctttctgagcttcttctttgctgttcatcgattcaatttcctgaaggatattgtatttgatgaattttttccactcattatactgctcctgcttgtttgccggaacttttttcattttcggttctaaaataagcgtttcatcttcttccagattaatcggcttgctgaaaatatcctgcgtaattttatcgatttcgtctactctctggtataatctgtcgatggtaagtttgtagaaagtaagatctccctggttgatgtaatcatccagtttcgtttcgtgtttgccgaactcatccatatcggactgaatgaaatatctttttcccggatctaccatttcaaaataatgcttataaacatccttagaataggcatcattaataggttttgggctgtaatgcaaataagaaagtgtatttttaacgctcaccattatcgtctgcatcttttcgtcatcattctttggcgagttgaaacaaaacattagacttgttaatggaattaggagtaaaaatttatttagcttaaaatttttccacataaatctgtaatgtatttttattaattttaaaaaagtattgtaataagtagttattttttattctccgttacaaactatcaaatttaataccttatttctaaatatctgttacttttaaggaattttattaaaatccgttttccaatacattttctctgttaaaattgttttttaaaaaaagagaattgttagtttttaaatttagttttcgcaaaaatgaataaaaaggcataaacatttcatacaataattaaacgcaaagtttttccgaagaaactctttatgctatatttgttacaattaaaaaatttatatggaaagaccacttattctggttacgaatgacgacggaattacagcaccgggaatcagaaatcttatcagttttatgaacgaaatcggagaagtagttgttgtagcgcccaactctccacaaagtggtaaaggtcatgcgattaccataaattctactttaagctacgaagaagtacatctcgacggtccgcaaaaggatttttcgtgcagcggaactcctgttgactgtgtaaagatggctcttgacaaaattcttccgagaagaccggatattgtggtttcaggaattaatcacggagcaaattcttccatcaatgttatttattcgggaacgatgtctgctgctgttgaagcgggtgtggaaagtcttcctgctatcggattttctttgctggatttcagttgggaagcagattttacacaggcgaaagaatatattcagaatattgtaagaaaaactctggaaaacccaatgccgaaaggaattgttttaaatgtgaatattccgaaacttccaaaagaggaaataaaaggcgtaaaagtctgcaaacaggcaaatgcaaaatgggaagaaagctttgatgaaagggtaaatcctcacggaaaaaaatattactggcttacaggctatttcaacaatatggacgaatctgaagatgccgatgaaaccgctttagcaaatggatatatctctattgttccggtgaaattcgatcttacagcttacgagtatatgaatacgctgaatgaggtgatgaattttgattaaacataaatattgaggcgtaaaaaaatttacgccttattattgtccttttgtcttgaaatcgaagatttgacgtcgtcaaacaaaagaacgaaaaattcaagacttgggaactttcgctaaaaattaattctgttctctaaaaattctaaaactcgcgcgaattcaagatttgttcttcggctcaaacagtcctctcgcgctcaaacagtagaatttttttaacgttcacagaagtaattttcttaacgtttcatttccctatgtcattattaatgcacaaaatcattaaaatagctgtgaaatttgtcaaaagaatttagaacaaaactttatcctctttcctcaattcctccagatatttgcttttatcatcacggtaaaataaattcatggtttcgaaaggaatcattttcaggtctttatttacgatatgaacacaggattttttcacagcgcggacatcaaaatcatgcgcatccataaagttcatgatgataattctgaacaggttatcataatccagattgggtgcggaaacgtcgggaagacagcacaataactgattaactttaggttttactttatctacagaaattccggtgctgaaaatatccagaagctgcatctgtaatccggtatcctgttcgtaaacaatggtattccgggtttcattgttcagtaaatcagcaggattgatgtatcgtgttaaaggaattgtctcaccttccagtttcagaatatatcccatcgccaaagcatcgggattacacggaaccggaatgatatcgtccgaattcagcaacggaacctgattgagaatttcctgtcttacttctgttaaagtaattttttcatgagcagaatcttcgcggtttcttcctgcaatttctacaggctgaaaggtaattccgcggacacatttctgtttcagggcaaagtcaatgattttcccgatttcatcaatatttttatctttctgaagaacaataacgagggtagtcgaaagatttaaggcatttaatttttccaatgctttcattcgtacgtccgttaaatcttttcctctgaaatcttccagaacttccggtttaaaggaatcaaactgaagataaatttcaaattcaggagcataggttgctaatttttcggcaaaaccgggatcattggcaattcttaccccgttcgtattcagcattaaatgtttaatgggttttgacttcgcaatatccatgattttaaaaaattccggatgaattgtaggttctcctccactgatctgaacgacatccggttcaccttcatttttaacgatcacatcaaacatcgcttcaatctcctccagagttctgtggcttccgtaatgtggcgaagacattgcgtaacaggtaggacaggttagattgcaccgatctgttacttccacaatggaaaggcagctatgttgctcatgatcaacacataaaccacaatcataaggacagccatattctacatcggttccaaaatgcaccggaatttctgatgctttattgtagtttctgatatttttataatactgaacatcagaagcaattttagttttgaaaaatccgtgatccggacatcttttcgtcatgaaaaccgcttcgtcttcgatgataatttttgctccgactcttttcagacattcggggcaaagacttatggtataatcgtaatacgtataatttcttactggcataataattcttaatttataaagctcctccgcaaatcattccactaataatcaaacaaataagcatggaaatcgtgacggtttgccaaaattgtttcttcgaaaattctttattcttcctctgaaaaatagcttccgtaatttttccaactataaatgaaattccaaaaatagttcctccaaatattaaaagtattactaatatgctaatcaataaatccatcttaatttcttttacattccgccacaaacaacgccgctgatcagtccgccaacaagcatggaaatcagaacagtcatccaaaactgacccgttgaaaattttctttcattattccattcgtaaataacttttgtaattacggcaacaacaagcgatatcatcaataatacaaaggcaataatcccaatgatcattacaacaagaccaccaagatctcctacttcaagaaatatcagtaatttcatggttaaatatttaaagtgaagttacaaattttgtttttctcaattttaagaaataataaaaaattacagctatacaaacaagctgtatggttcctaaatttcctaaaatttctactctcggcttgatgaagtccagcaacagccggaagctaaaataactgaccataaacaactgaaagacgaaacctgaaggatatttttttgtattctggatgatttttaaaacgatccataaaagaatgagaaacgctatttcatataatgccacaggatgtctgagaaattggtctcccagatgcattccgaaaataaaatcagtaggaattccgtatgtttcttcatgaattccggtaagaaagcagccgattctgccaataatcattgctaagatcagtggatagacgatcaaatctccggtactttctttatgcccgacagttttttttgcccattcaacaccaattaagccaaaagccaatccgccaacaattgtattatttgtccagatggttttcaaatcaaaatgctctaaaagtctgatggggttttcgagatttccaattaattttgatccgattaatgctcccgctgttgcaccaattaataccgcagccgaagtattgaaagacattttctctttcgattttcgttttagataaaaataaaaccgcattccgataaaaattcctgccgcttcaaacagcggatgagcgagaatcgttttaccaaataggtgaaaggtcacaggaaattccatggtttcaaaagtattgtttttaattaaaacttactcaattattatcgtgattttaaaattgatctaaacattttctttaaaattttatgtgtggtccttttgtcttgaaacaaaagaacgaaaagttcaagactttgaatctgaatgctaaaaattaaaattcattcctaaaattcccaaaacttgcgcgaattcaattggggtcttttgattaaaaatttgcctcgcgcttcaaacagtgggaattttttaacggaataaattgtaattttcttaacgcttcagcttcatatgtcgatttttctgatcgtatttatgatttagtaagcttctgaatcaagatttaaattgtattaaataatttttgattatccgctattaattatactgttttttctaacgcaaaggactcgcaaagattctttatatactaactgtttttaagttcgcaagggcgtttcactcagcaaagaactcaaagatttttttcaattatgacaaataacggacaatcataaataatttataaaatccttttaaataaagattagaatcaatctttttcataaatttaattaaaataattatccgaattatgagaatagaatatgatattaaactgggttttaaggatgtaatgttccgtccgaaacgttctaccctgaaatcccgttctgaagttgatcttgaaagagaatttacctttaaacatacccgaaaaaaatggcagggcgttcccgtgattgctgcgaatatggatacggtgggaacatttgaaatggcggtagaactggcaaaagaaaaaatcatcacagcagttcataagcattattctgtggaagaatggtcagaatttttgaattctcagcctgaaaacatttatcagtatatcgcattaagcacgggaaccggaaaagcagatgaagaaaagataaaaaccatcctcgaaagacatccaaaaatcgagtttctctgcattgatgtagccaatggttattctgagcattttgtggaatttgtgaagaaggcaagggcaaatttcccagataagatcatcattgccggaaatgttgtaaccggagaaatggtggaagaacttctgttagtcggcgcagacatcattaaagtcgggattggacccggttcggtttgtacgacgagagtgaaaaccggagtgggatatccccaactttcggcaattatagaatgttccgatgcggcacatggtttaggaggtcatattattgcagatggcggctgtaaagttccgggagatgtggcgaaagcttttggcggcggtgcagattttgtaatgttgggcggaatgtttgccggacacgatgaaagcggcggcgaaattgtggaagaaaacggtaaaaaatacagacttttttacggaatgagctcgaaaacagccatggataaacattcaggcggcgttgcagaataccgggcttcggaaggaaaaactgtaaaagtagcttataaaggtccggttctggatacggtgaaagatattttaggcggcgttcgttctacctgtacttatgtgggcgcttccaaactgaaagaactgtcgaaaagaacaactttcatcagagttcaggagcaggaaaatcaggtatttaaagattaacaattggacaaaatatttaatattacaaacggtgattgtctcgctgagcaattgaaggaaacaacaatttccggcgagatgatcatctgtagagaaactttagttacaggttccttacaggctgaaaatcttgatgttttctggaaggtaagatcagaattcattgctgaaaattatggtgatacaaaagaaaattattaccataaagtggtttcagaatgtaataagatgatgcagattccggaaaattctgaggtacatctttggtttgaagatgatcttttttgtcaggttaatatgtggttttgcttaacgctgattccgaaggataaaaatatcaatatctacaggatttttccaaaatcattgaaagaaaaccagtggaagggattctcggattctgaccgttttgatttggaagaaacattaacctcaagagttttatttaaacaaaaggatcttgaattgggactgaatttatgggaagcttatcaaagtaatcatcaaaataaattaaaacaactttctgaaattcaatcagattgcttatgttttttacctgaattgattgcaacttatcaaaacattaatcctgaagtttttattcaaaatttaatacagaacggcataacagattttagtgacgtgtttgaaaagttcagtgaagatctgggaattttcggattcggagatttgcaggtgaaacttatttatgacaaagtttttcaggaaaaatagtgcttattttacatcaatactttttttgttgaaatatttttccaactgatcattaacatactttttctcttcttttgcggaagacaattcatcaaaatacagtattttcggcacttctcttattttatcaatctttaaagagtcttcttttgaattttgaattaaagaaattctgctttttatttcttcatcatacgctttcagatctgttacagcgatttcctgaacgaaattattcatgttataatctatattaaaccctgaataactctgactgaaaaaatctgtttccggcagaaagatgactaaaaaactgatccaccaaaatctttttaaattctcctttttgtatagtaaaatgaaagaaagcgtgcttaaaaagaagatgacaatgttatcgttctgtcttcctacaatattaataagatagcccaaaaacattaaaggcagcaatgaaatcatgcagattatacaggctttgataaagttaattttgctttttaaggcagaaagttcttcaaaaaacaaagaagtaaataaaggaataagaaatactgtttttataaaaatatacccaaaattaaaagtgaaaaaagccgctcttttcgtccacatccaataaaaagcatcatcagattttaccattctgttaaaatttcccggagctaaaaagctgataagaaatccgataattccgatggttaaaagaattttgttttcctttgatgatttctcaaaacatataaagctcaatcctcctaacaaaagcagcgcgatgatttcatttgcccccattaaaataaaaatgataacagcgcttaaaaagaagaacagttttttgtgtgattgctgaaactttccgtaaaaaaagagcaaaagacccgataaaataaccggcaggaaatagacattagatcctgtgatccaaaaataatgttccggtaaactgattaatccaaccgtataaataaaaaacaataacagactctttctgagcgcttcagcaaaggaataattaaaatacagtctgaaatttaaaataatgactgcaagaaatgatatcagtaaaaatacaggataaattttcgggagtatattgaacggatctttagaaacaggattcagcatattaatagtatagccaaaatatcttcctccccaatgcatataaaaatcgcagacattccctagaaatcccaacttctttgttccgtaggaatagatataatcatcggtctgatatacattaaaaaaggaaatgtaaaccagaccgattagtagtaaaaccgacaagaataaggtaatattctgtaccgttttcatattttatgtcaacagacctccgtcaacgtttaacgtctgtcctgtaacgtaagaagacatttcgcttcctaagaatacacacgcatttgcgatatctctggtctgtcccagttttttcatcgggatagcttcgttccatttttcttttgctttatcatctaaagcatccgtcatttcagtctggatgaatcccggagcaattgcattgcaacggatgtttctggaacccaattccagcgctacagattttgtaaaaccgataactcccgctttagaagctgcatagtttgcctgtcctgcatttccgctgattcctactacagaagtcatgttgatgatcgatcctgcttttgccttcatcatgggcttaattaccgctttggtaaggttaaatacagaatccagatttactttcattactttatcccagtcatctttcgacattctcaaaagcagattatcttttgtaattcctgcgttatttaccaaaatatcaattttcccaaactcagcgattacttcatccactaaagtctgagccgcatcaaaatctgatgcatcagactgataccctttaatttgagttacagaacttaaagttgcttccaattccttcgctttttctacagatccggcgtaagtaaatgctacttttgcaccctgttcggcgtacatttcggcaattccttttccgattcctcgtgtagctcccgtaattagcgctacttttccttctaatagtttcatatatgacaattatttttctttataacgtattcgccttttgaaagttggctaatatacagtatttaattttacagaaataaaacagtgcgcaaagatattacaaaatgttattcaatgcattttaaatcacttttttagcgaaaatttatgcctgttttttatcatgaacgcacatcatgtacgttaatcgataaaacttctgtctttttgctctgtaaaatagatgaattctgtttcttttcctttggtaagtttaatgccttttttatccggaaaaaacttatcgtagacaatttccgttaaaggttcatttttatcgttggtaacgccgaatttattatcttttttcaccacaaattcgttaactcccaaaaatgttgtgatgtcatcgtagacaaaaggtacaatttcatttccgctttcatccatcatgccgtaaaaattgtctatgtttttcccgactaaagtaggataaagttcaaaaggctttacttctttaaatcctttcagctctttataatttccagttttaggagaaaatgtgtaaaaggtttcgtttttattgacaatcagtgtattggggaatattttttcgatttcgtaatcgtcattcaggatattttttaaatttttatccagaattttttcttcgtcatcttttctcagatagagatatttttctccggcaatgttcaggccttctaccctgtcgtattccttcggaaaaaccacttctccgtttaaacgcacaacggcagtttttggatttttctgatcctgagaggttttaaacaaaccattgaaaagtgggtttacataatgataatcaagatcatacaccttcccttccttcttagaaaaaatacttactttatcttctctggtaaggtaaatgtattctcttcccacgaaagcctgttcatacatttcatcggcaatgatgttttctttttcatcaataattccgtatttatttttagaagtatctaaagttaccaaataaggaaacgcattgatattgtctacgttatgtcccgaaatggtgcttaaggttttaccattattatcaataacttctccggatttttcacctttcgaaagataagccttgcctttgtagaaacgaagatcatctgtaaacgttcggtctgaaattttctttccgtcaaaatcataaatcagccagactccgttatttttaacaaagaatctgttttcgcttccaaaaactattttttcagaaaaaggaataatttcttttccgttaaaatcgtaaacacattcctttcctttttttgaataaataagcctgtctttattttcccaggttctgaatctgaaaagatccatcggaataacttcctttccggaagcatcgataatcgctgtttttccattggaatttcccgcttttaccctcaaaacaaacctgtttttccataaatgcgaaatttcactttttgaaggatactcaaaagtgatattgcccagagaatctacaattccggactttccggttttggcatcagaaatcattccgtatcctttggaatagaaacggacttctttgcctgttttttttgttaaaagtatctgtttatactgatccgtctgcccgaaacagaccgacgaaagcagcacgaaaattaaatttttcaattaaatggaattatttacgatgagaacaatctcaccttttaacgttttgcttttggaaaactcaatgagttcaagaattgttccgcgtttggtttcttcgaactttttggaaatctctcggcttaagctaaccttggtttcttcgccgaaaaattctttgatctgctccagtgtagtattgattttatggggactttcgtataaaacgatcgtttttttctcttctgcaagctgcttcagctttgtctgtctcccttttttctgaggaagaaatccggcaaaaagaaattcgttattcggtaatcctgaaaccaccaaagccggaacaaaagcggttgctcccggtaaacagatcatttcgatatgatgatcggaacctgcttttgccaacaaataacccggatctgagattccgggagttcctgcatcggtaataatcgcaatattctgaccgcttttaaggtctgtaatcactttttccgttgtctgatgctcgttgtgtaaatgataggattttaaaggcttggaaatctcgaaatgctttaaaagaattccggaagttcttgtgtcttcgcataaaatataatcaacctctttcagcacatttaccgctctgtaggtcatatcttcgaggttcccgatcggtgtaggaacaaaatataagattccgctcaaaatttagtttataaaaatttattttccaccaatatccacagtctctgtgcatattcgtccactttactccattttttggcataataaagatcactcaggtattcttttgcctcctccagtgttctgaaactgttcaggttatttaccacttcattcagctccgtctggcttcctccgaataatgtttttgtgaaagcaatcctgtcgttcagatcgagtttaaactcaggctttttcttttccgcttccataaactcggttggaatattggttttcaaaatacttcccggctcttcttttttctcaacaggaattgttttttctgttgatactctttcaagatggtcatcatcaaaaagcgactgtaccgctttcagacctttgatatttgccagttttatcttcttatcatgataggcttcaagattttcaaagctttcatcagattttaagtgttctctctcttcagaaacaggtttattgatctcaacaatttttcttctgtcattaatttctgctaaaataggctgctcttgcttttcttcaacaactgcttcgtttttaatttcattaacgatgttttcagcatttgaagtatcggtcgccaattcgccttgttccatcattgtgtgggaagaatactgattatcattttcttccactaaaatttcttcattttcatctaaaacttctccatcaaaaatgcttggaatattttcagattcttcttcatttttatactgatagttgttctgaattttctcttcttcatcaaaatcattcagaatatctccacgatcgtccgaaatttcgttctcaaattcatcaatttcattcagttgatgattaaaaataacttcttcttccgttttgctgtcattaaaaatttcttccgagatttcttcatcattttcgggttcagaatttgccagaattctttcttcatccacaaaattcagatccgctccgctgttttcagaagtttcatattcatccagttcatttaactgagcattgaaaacatcttcattctctttcagatcattctgaatttcatcctgcgaattttcctctgcaaaattaactaaagtttcgtgaagttcaccttctacaatctcatttaattgattgttaaaaattgcctcttcttcagtcacttcagttgaataatttccggattcgcttccgtcaatttcattaagctcattattgaaaatagcttcttcttccgttacttcactgctgaaatcatggggctcctgcaaaggagcgggtgtagaaaaattttctttattttctgaaatcagcgaagaattttcacttccgaaatactcgatatttttttccagcagccggagaaacgaaatcctgttggcaagctcttccacaagatcctgctttgacgaaagttcgtctacgttgcttattttatccaaaataccaatgatattcttggattcaaaaaaaatcttttcctttaaatcttggatgttctgcatagaagaatcttgttaaaattgcttacttttgaagttaaaaatatacggctaatttaacaaatgtttttagaaaatacaattaatcattccaaacaaagtggttggatggaagttatttgtggctcaatgttttccggaaaaaccgaagagttgattcgaaggcttagaagagctgaaatggcagggcagaatgtggagatttttaaaccaaaactggatacccggtattcggatgaagatgtggtttcgcacaatcagaataaaatccgaagcacggcggtagaaaatcccagcgaaattcttttgctggcttccaactgtcatgtagtggggattgatgaagcgcagttttttgacgaaagcattgtggatatagccaatcaactggcaaacggcggaataagagtggttattgcaggtctggatatggattttctcggaagacctttcggaccaatgcctaatctgatggcaactgcagaatatgtaacaaaagtacacgcgatctgcagaagaacaggaaatcttgccaattattctatgagaacttccgcaggaaaggatcttgtagaactcggagagacagaatcttacgatgcggtaagcagaagagtttttgtggatgaagttttgaataaaaaagagatttaatatcaattttattattaattttgtttaaaatttaatagtgaaaactatcagaaaatgatattagagattaaaaattacataaagatcagcaattctattgacgagattctgaaaaattcgcctttcaaaatgaaatacatcattgaaaagagcggaatttccgagcctacgtttttcagaaaaatgaaagagaaaaaatttcttccggaggaattgctaaagattgcggaaattatagaaccggaacagtctttcctgaattctttaaaagaagctgaaaatgattttgaaaacggaatttatcatacacatgacgaagtaatgaaagtttctgaggaacgttttctgaaaaagtatggaaataaggtggtctaaattcgctcttcaggatctcgagcagatagaagattatattggaactcgatttacctacaaagaatatcagaattttatacatattcttaaccacagaattagtttaattcttgacagaaaagtagtatttcaaaaactggaaaaatttccggattataataaaattctaatcacagagcagactacacttatttacagattagaaacaaattatctgaaaatattacgtttatataataattttcaggacgaagataaaaaattcatcatagacgatttataatgaactttacagcagaggatatcgcagaaatcaccaatgcgaagattattggaaacaaaaatatattgatcaggaatatcgctttcgacagcaggattatttattctactaaaaatactgcgtttatagcgatcaatacttcaaaaaattccggggaaaagttcattgaatctgcggtagaccgtggaataaacgtcatcatttccgaacatcatcatccgcagtttgaaaatattacatggatcattgttgagaattctgtggaatttcttcaaagattagctaaatttcattttgaaaatgctcatttaaaatccgtcggaattacaggaagtaacggaaaaacaattttaaaagagtggctgtatcaatgtctgtggaatgaatttccaacggtgaaaagcccgaagagtttcaattctcagatcggacttccgctttctctgcttcagattaacaattctcatcggttaggaatttttgaagtaggaatttccaagccgaacgaaatggaaaagctcgaaaatattttccatccgcagattggtttgcttacccatatcggaactgctcatcttgccaacttccaatcggaggaggagctgattgatgaaaagatcaaattattcaaacactctgaaacggttatttataacggagataatcctctggttgacaaaaagataaaagaattatattcaagtaaaaaattaatttcttacggctttaaagaatacaatcaggtctatttcaaaaacaatattttgaaaaacgaagaggtaacgatacattatttcgacgaagaaatatcttttccggttcatcagagagatgaagcgaccttaacgaatgctttggcgcttgtaacggttttaaaggaacttggtattgaaaacgaaaagatcgtcgaaaaaatcaacgctttaaaggctgttgaaatgaggcttgaagcgattgaaggaattaagaacaacattgtcatcaatgattcttttaaccttgatcttgattctctgaaaacagctcttcaatttctcaatgaatacaacaaaccgaaaaaatctctgattcttacagatattgtaggggtaaattcaaattcaaaagaactgtatgaagaagtctcagaacttgtaaacgagcagaaattcgattctgttttcctgatcggtgatgaaatatcaaaatttagtgaattatttaaagctaaaacttttactttcatcaatactcaggaattaattgaaagtaaacaccttacagaaattgaaaatcagatcattctattaaaaggggcaagaaaatttgagatcgaaagacttaaagatctgcttgaactcagaaaacacgatacggttttagaaattaacttgaatgctattcttcataacattaattaccataaatctttactaaagccagccacaaaaatgatggctatggtaaaagcaaactcttatggtttaggaagttatgagatttcggaatttttacagcatcatcacatagattatcttggagtcgcttttgttgatgaaggtgtagaactcagaaaaaaaggaattaccgttcctattgtggtcatgaatcctgaacagcatagttatgaaaccgtgatcgcttataatctggaaccggaaatttacagtttcagagttctcgaattattctatgaagccgttcaaaaatccggatatgataaaaaatatccgatccacatcaaactggaaacaggaatgcatcgtcttggttttaaaggcaatgaactggatcagttaagtgagactttaaattcaatgaatgtaaaggttcagagtattttcagccatctttcatcatctgatttaccggatgaaaaagaatttaccttacatcagctagaaacctttgagaaaaattccagctatttgatagaaaaattgggatacactcctatccgacatattttaaattcttcaggaattacaaattacaccaatcatcagtacgatatggtaagaatcgggatcggaatgttaggagagtcaccaaatagtgaaatacaaaaacaattgagatctgtcgtaagttttaaaacagtgatctctcaaatttctacggtagaaaatggagaatcagtaggttacagccgtcgatttaaaacagatcatcagacaaaaatagccactattcctgtaggatatgccgatggaatcccaagattaatcggaaaccaggtcggaaatgtaggaatccacaaaacccttgctccgattgtaggaagcatctgtatggatatgatgatgattaacgtagatcatatcccgaatgtaaaagaaggcgataccgtaaccgtctttaacgcaaaaccaagtttaaaagaattcgcagactactgcaaaacaataacctatgaagttttaacctccatttcgccacgcgtgaaacggatttatattaaagattagcctatgagaaagctcctgattattttatttgcctttcaattgcttctgattcagtctcaggtaaagaaagatctcgttattccgaaaaatcccaaaataggactttctcttgcaggtggcggagctaaaggattttctcatgtaggcgtacttaaagtgctggattctctgggcgtaaaagtagattatattgcaggaacaagtatgggagccattgtaggcggactgtacgcttcaggatattccggaaaagaaatagaaaagattgtaatggataccgatttctattctttaatcacagatcccaaagcaaaacgacaggaaacaactttctttaataaatccgttgacaaatatcttctgtctattcctcttaaaaacggaaaaattacactgccctcttccatcagttccggacagaaaaatgtatatctactgaaggaacttttcaaaaatgtttccaacatcgatgatttctccaaacttcctattccttttatgtgcgtcgcgaccaacctggaaagcggcaatatgcagatttttgaaaaaggagatttggtacagtcgattatggcaagttctgcatttccatcactcatggaccctgttaaaattaatgacagtatttatattgacggagcgatgacggtaaactacccttccaaacctttaaaagataaaggaattgatatcgttatcggggtagatcttaatcaggatctttcaaaacgtgaagacctgaacagtattattgccatcttaaatcaggttattgatttcggaattaaaaaagataccaaaagacagtatcaatataccgacatcaacatcaagcctaatttaacaggcatgaccgctacaagttatgatgataagaaaaaaattctcgacagcggctacgtagaaggcttaaaatacgtcgatattctcgatcagctacccaagagacctttcgacagaataagacagcaaatgaaccctatttataccaatgtatataaaatcgacagtctcgaaattgaaggcagcaggatttacggtaaaaattatgttttaggaaagatgggactgcgacttccttctctgcaaacctacggaagcataaataaacagattgataaattagtcgccaccaacaattacaaattcatcaattacgatattgtttacggaaacaattcaaattatctcaaactttacgttaccgaagacgatacgcgacactttttaaaattcggattgcattacgacgaaattttcaaaaccggacttctattaaattattcagcaaaacgacttttattccgaaattcaaatctttctctcgacattatagtaggagacaaaccacggtattatttaaactattttattgataacggatacattccgggcttcggaatttattcttcaggaatgagctttaatttaaaagacgttaataataacgaagtagataaatggttctggctgagaaatgaagtctaccttcaatcgatatggaaagataaatttgctatcggcggcggaatcagtcacgattatttcgaagcagaattcaacggagacaataaaagatacagcagatttctcaatccgtacgtatttctgaaaagcgatacccaaaacgacagagacttccctacccgcggaatttacattaacgcagaaggaaaagtaattgatcttttaaaatctgaagtagataaaagactcgttcaggtaaaagcagacatcaggattaatcttcctctttcaaaacagttttcctacagactcaatctttacggaggaatcaccatcggcgaaaaccttcccgacttctacaaatacagactgggcggaatctttgaacagaatatcgtaaacgacagaagcttttcggggttctattttgctcaactgaacagcaataatgtggttttaatttcaaacgaccttcagtttaaattcaataaaaactatttcctgagcggaaacttttcttttgccaacctttccaatgatataacctttgaggatgcggtaaaattaaacttcagttcagtaggattaacggctggatacaaatctcctttcgggcagatcaaaatcaacttcagccattcacttaaaaacaatcaaaaaggcatattcagtgttatcttaggacactggttttaattacgaaatgatacaatttttttacgaaaacttacccgaatcggtaaacacagaatacaaaaaatggctggaagaccttattctttcagaagaaaaaaagttgggcgagatcaattatattttctgtgacgacgaatatttactcaaggtaaatcaggattatttacagcacgattactatactgatatcattacatttgactatgtaaaagggaagaccataagcggcgagatttttgtatctttgcagcgcatttcagacaacgcttctaccctatccagaaattacgaagaagaattacggagagttttggcccacggtattctgcacctttgcggatataaagataaaacagaagaagaagaactgcagatgcgaggaaaagaagatcattatttagcaaaataccgttaagttttttttaggagcttaatcccgctctccgcactcgctattttcttttttcaaaagaaaatgagctcagacaaatgctgcgatcggggctaaataaagcgcaacagaacagatttaagacaataaaatttacaaatgtttcacgtgaaacatttgtaaaaaaaagtaaaaattaaggcttaaaacaagcaaaaaaatgatttcagaaatatatgatgtaattgtagtgggtgctggtcacgcaggatgtgaagccgccgctgcggcagccaatttaggttcaaagacgctgcttattacaatgaatatgcagaccatcggacagatgagctgcaaccctgcaatgggaggaattgcaaaagggcaaatcgtaagagagatcgatgcgatgggaggatattccggaattgtagcagacaaatctgcgatccagttcaagatgctgaatctttccaaaggtccagccatgtggtcgccgagaacacaaaacgacagaatgcttttcgcggaagaatggcgtctggctttagaaaatacacccaatcttgatttctttcaggacatggtaaagcagcttattatcgaaaataataaagttgccggagtagttacgtcattaggaatagagatcaaaggacattctgtagttcttaccaacggaactttccttaatggtttgatccacgttggagacaaacaattaggaggcggaagaatgggcgaaccaagagctttcggaattacagaacagctcgtttctttaggctttgaagcaggaagaatgaagactggtaccccaccccgcgtagacggaagaagtctggattattctaaaatggaagaacagaaaggagatgaaaatcctcaaaaattcagctatttagatacccctaaattaaccagacaattaagctgccacatcgtttacaccaacgaaactgtacatgatattttacgtgaaggtttcgacagaagcccaatgttcaatggtacgattcaaagtttaggaccaagatattgtccgagtattgaagacaaaatcaaccgttttgcagagagaaacagacaccagttgtttgtagaacctgaagggtggaaaacagtagagatctatgtaaacggattcagttcttcccttcctgaagacgtgcaaattaaagcaatgaaacatattccgggattcgaaaacgtaaaagtattccgtccaggctatgccattgaatatgactacttccctcctacccaattgaagcataccttggagacaaaattaattgataacttgtacttcgcgggacagatcaacgggacaacgggatacgaagaagcagccggacaaggtcttattgccggaatcaacgctcacaacaaagtaaaaaaccaggatgaatttatcctaaacagagacgaagcatacatcggagttttaattgatgatcttatcacaaaaggaacagaagaaccttacagaatgtttacctcaagagcagaatacagacttcttttaagacaggataacgcagacatcagattaacgcagaaagcttttgatttaggtttagccaaagaagaacgtttaaaaagagtaaacgaaaaagtcgctcagagtgaggaacttgagaactttcttcgggaaacttctttaaagccgggagtaattaatcctattctggaaactatcgaaagcagtcctgttgatcaggcttacagagcagctcagattcttacaagaccgaatatgacgttagaaaaactggatcagatcgactttatcaacgaagtttcttctaaatttgatgatgaagtaagagaacaggcagaagtgaacatcaaatacagaggctatattgagaaagaaaaagaaaatgtagctaaactgaaccgtctggaaaacattaaaattcctgaagatttcgattatacaaagatctcaagtctttccgcagaagccaagcagaagatgacgaatgtaaaaccaaaaacaattgcacaggctggaagaatcagcggagtttcgcctgcagatattaacgttttattagtttatttaggacgctaaaacgaaaatgtttcacgtgaaacattcataaaaatacaatcaaaaattaaggtatttatgagcttatacaaaggtctgaatatcttaatttttaattttaaagaaaaatcaaatgaaaataaaagatcattttctatctcaggaaatttttgaaattattgaaacagataccaaaggagttttcaagacctcccctattccatccaatatttcaaaatattatgaaagtgaagattatatttcccaccatcaggattccggaagtcttaaagaaaaactgtataaatttttacagtcctttaatttgcagtacaaaaaaaatattcttttagaccgaatcagcaaaggatcaaaagtattggattacggttgcggagccggagaatttgtaaagtttatagaaaatgatttcgaaactttcggttttgaaccggatgcagatgcaagaaaagcagcccagaataaaatttcaaaagctactattttagataatattcattccattgaagataaaagtctggacgcaattactttatggcatgtttttgaacatatcgaaaatcaggacgagatgctcgaaattttcaatcgtaaactgaaagacaaaggactgttgattattgccgttcccaatcctacttcctacgatgcgaaacattataaagaatattgggcagcgtatgatgttccgagacacgtctatcatttttcaaaaaacggtatggaaaatctgattgctaaaaaacccaactggaaaatgagaaaaatcaaacctttggttttggattcttattacatctctatgctaagcgaaaaatataaaaaatcatccctattttggctaaaagcaacgatcttcggaacgatttctaacgtaaaagcccttttttcgaacgaattttcaagtttgatatacattatcgaaaaaaagtagaaaatcgaaatttaagccatttctgaaggtcaatttttcagaatttgagccttgaaaatcaaaatcccgggaaattctccgggattttattttttatcacctcccctactcgatttaaattttcagaatattttttacacaagattaaattttgaaaaaaatcagatcagaattttaaaatttgttagtaaaaagttagtaactcaaaatttgactctattttttgaaaattagaaaagtaacaatagtttttaaaaacttcaattttcatccttttagaattttgaaaattttaatcattacatcattatcatattttttgatttttgggcaatttttgaaattaactcaaatatgagcaattaagtaaaaaatgaattagcaaaaattttggtcaattgtagaaattttaattctctggtaattttcaggatttgaaaatttattcatcgataaatcaaaaatgaaaattattaatttgttcctcgcatttgaaaattaaaaatactgatcttttttaaagaaaaatatttaaacttttatataacaaaagatttaaacacattagtttcttaaatttaatacttaaactgaaaaagaatacataagtaaaaaaatcaaagatttttctctttgcagacttttgtaatactttaaataaattcaataaagtcttttgtatcttttgcggttaaaattaaaatgactttgagcaagcttaaaataaaaagtccgccgaaaaaatcagcggacttaagatatataaattaattttcttaattgttaatggcagcaacacccggaagttccaaaccttccagactttccaacatcgctcctcctccggtagaaacataacttactttttctccgtaaccgaattgctttacgaaagcaacactgtctcctcctccaactaaagagaaagctcccaattttgtagcttcggcaatactgtctcccaacgcaattgttcctgcagcaaagttagacatttcgaaaactccgatcggtccgttccaaagaatcgttctggaatttaacaatacgtcattgaactgatctctagatttcggacctgcatccagtcccatccaacattcaggaatttcgtaaatatccacttcttttctgtcggcatcattactgaaactttcagcaattactgtatctgaaggaagataaacttttactttatgttccttcgctttttctaaaatctccagtgctaaaggtaacttatcttcttccactaatgaagttccgatctttccgcctaaagccttaatgaaagtaaacgccattccacctccgatgattaaattatcaacagccggcaaaatattttctataatggtaattttagttgaaactttagaaccaccaagaatagctgtaacaggtctttcaccgctttttagtactttatcaatcgcctcaagctctttagccatcaataaaccgaaaaatttagttgatggaaaaaatttagcaataaccgccgttgaggcatgtgctctgtgagctgtcccgaatgcatcatttacatacgcatctgctaatttagaaagctgttctgcaaaagcttcagcgcctttttcctcttcgttatgaaaacgcagattctccaacaaaagaatttctcccggcttaagctcagaagaagccttttcagccttttctccaacacattcgtccacaaacttaacttcctgtcctaaaacctcagaaacctcgtctacgatatgtttcagcgaaaactcgtctttaacctccccttttggtcttcccaagtgagccattaaaattacagaaccgccatctttaaggattttatccacggttggttttaccgcaacaattctcgtattgtctgttactttaagctggtcgtcctgcggaacattgaaatccactcttacaagcgccttcttttcattgaaattgaaatcattgattgttttcatatgtacattttatattttttcaggtaaagtgaaccgactttgagaatccattggctccattttttccggcaggtcgagttcattcatttagttcaaattttgtttcacaaatgtaagattttaaaattttcagaacgattcaagctttgaaaagttttcaaaaagtttcccgcagactcatcattcatcaatcaacataatttcttttctcttaaaaaaagaaaaatgatactgttgttgagtattgttagtttaggggataaattttaatgaaatactttaccacatttaattttaagccaattcacaacttatatacattgtaatccattgatattagagtatttcacatcgttattaacaattgtgggtaactttcagaatttactattattaataaatattttatggaaaatcctgagaattctccccaataactttgtgtaaaaaaatgtcgtatttatgaaagtaaaattccattacaaaatttttcaatgttacgaaactttagttttagaacttttttcaacagttacccacaagcgttttcacaattaactcgcaaaaatttaagacttatccacattatacttaactttgtgtggaataaatctattaaaggcttaatacaagtattatgaaaagaaaaatagcaattgctgcagaccacgcaggctatgaatacaaggagattgttaagaactatctttcagaacgttttgaaatccaggattttggcacgttttccacagacagtgtggattatccggactttgtacaccccgctgctacatctgttgaaaacggagaaaatgaactgggaattttgctgtgcggaagcgggaacggagttcagatcactgccaacaaacatcagaagattcgctgcgcactttgctggatgccggagattgcttcattggcaagacagcataatgatgctaatatgatttctatccctgcaagattcatatcaaaggaagtggctatcgaaattgctgaaaaattcctttctacagactttgaaggaggtagacatcagaacagagtagacaaaattgcattctgctaaaagtataaaggcttgtaaatcaatttgcaagccttatttattttttattttgtatatttgcagcgtccaatagaaattacaatctattatttccatacaagcctgtagaaaatttaaaaacacattattaaaaggtttttctccactcttctccatatttgtattaaatttatacaaaactaaaacttccgttgtagaataaatggaaggaaaattgatgggtttttaccaataaactaaactttaagatttaaaaaatcttttgttaaaagatgatttaaatccctctgatcgggagatcagaattgaaaatttaacgaattacaaattaaaatggcaaaaaaaagaaaatatataagtcagaaaaatgaacataaactaaaggaaatcggaagactgatccttagatttatgaatgaaaattccacgaaagtctacaactataagcagattgcagacggaatagattataagaatccaagacagagagaacttgtgattcaggcactgcacagattgcaggctgccgaaagaattaaagaaacagaaaaaggaaaatatattgttaaccttaatatcaaaggaacgttaacaggaattatcgatttcaaccagtccggtaatgcttatgtaaaggtagaaggtcttgaagatgatatttttatccactccaaaaacgtaaaagatgctttgcagggcgataaagtattaattgtaacctacacttacaaaggtaaaaagctggaaggctctgttcttgaagttctggaaagaacgagaacagaatttgtgggaactttgcagatcgttcctcacaaagattttggttttgtggtttgcgataaaaagaccattaacactgatatttttgttccgaaacctaaattcggaggtgcggaagacggcaataaagtaattgtaaaaatgacggaatggagaccgggagataaaaatccggaaggagaaattatccaggttttaggagctccgggagaacatgaaacggagatccactctattcttgccgaatatggactgccgtacgaattccctgaagaagtggaaagagatgcagataaaatcgacagaagcatcaatgaagaagaagttgcaaaaagatgggatatgcgtggaattacaaccttcaccatcgacccgaaagatgcaaaagattttgatgatgctctatccatcagaaaattagacaacggaaactgggaaatcggagttcatattgcggatgtttcgcattatgtggttccgggaacaattctggatgatgaagcttaccagagagccacttcagtatatctggtagaccgtgttgtaccaatgcttccggaagtattaagtaatgatgtctgttctcttcgtccgcacgaagataaatttactttttcagccgtttttgagctgaatgacaaagctgaaatcaaaaaacagtggttcggaagaacggtaattcattcagacagacgatttacgtacgaagaagcgcaggaaagaattgaaggaaaagacggtgatttcaaagaagaaattctggttttagatcaattggcgaaaatcatgcgtcagaaaagaatcaaagacggagcgattactttcgacagaagcgaagtacggttcaatctggatgaaaacaacgagcctgttggagtttactttaaaataagcaaagattccaatcatttaattgaagaatttatgttgttagcgaataaaaaagtatcggaatttgtttctctgaacaagagaggggaaatttcacagaatacttttatttacagggttcacgacgatccggatccggcaaaactggaatctttgagagattttgtgtcgactttcggatataaaatggacttggcgaataccaaaaaagtagcagaatctttaaacaaattattgcacgatgtaaaaggtaaaggcgaagaaaatatgatcgaaactctggcgatgagaagcatgagcaaggcggtttattctacagaacctatcggtcactacggattgggattcgattattacagccacttcacctctcctatccgtcgttatccggatttaattgcacacagattgttgcagcattatcttgatggtggaaaatctccgaacaaggcagatctagaagaaaaagcaaaacactgcagttatatggaaagactggcagcagatgcggaaagagattctataaaattcatgcaggtgaaatttatggagaaacatttgggagaaactttcaacggggttatttcaggtgttgcagaattcggtttctgggtagaaattcctgaaaacggtgcggaaggattaatcaaattaagagatttaaccgacgattcttactcttatgatgcaaaaacccacgccgtatacggaaacagacatggtaaaaaatatcagttgggagatcaggttcagatcaaagtggttaaagcaaatctgattcaaaaacaattggatttcaagattgtggattaatgactaaaattgataaatatatcgtttttagtattcttaatgcagttttggtatttactgtaatatttaaaacggtatttaatttttattggtttacaggaattattcttcttctggttattataagtaatattttgatcaataaaaacattatcagaataggagttttaggtaaaaattatttctttggaattaaatttccaatgatcataaatgccttttttctgattaattatataaccggaatgaatcctcagaaagaaacatattgctttaaaaatatgatcgctgaagttggaggaagaggtagtcatcaaaaaggaaagacaacttatatttatttaagtgacaatgcttatgaatactcatacatgacaagaagtttctttattgattataaaaggatgttatttaaaaaccaaattacttatacttttgaaaggggtatttttggtttaaagatcagaacagattatgaattcaaatacaatgaaaattgtttaaatgatccgtattaaatatgatataaattattttaagccactatcaacagtggcttttgtttttaatacgatgaaatcattttcatatttgctttttacaacataaaaactaactttgtataaatagatgaaattatttcattgaaaacaccactgaatgtttgaacttatattatctgccatcgttttaggattcatgctgagtctggtttttataggacctatttttttccttttaattgaaaccagcttttcgagaggtccgaaacatgctttagcactggatttaggcgttatttctgcagatattctgtgcattttggcagcgtattatgcgagtgtagatattgtaacgctcatcgataaacatcccggattttacaggattaccgccattctgatctttgtgtacggaattgtgatgatggttaccaaaaccaagatgcatattcccggagaagaaaaattcatcaatcagaactattttaaaacattcgttaacggttttttctttaatcttctgaatgtcggagtcatccttttctggcttgtcaccgttatttcggtgagaaatcagtatccggataccagtaatttcattttatacatcggaatcgtcatcggcacgtatctctttatcgatctggtaaaaatattccttgcaaagcagtttcacgacagacttacccaaaaattagccaacagaatcagaagaattgttggcggaattctcatcatattcagtttctttattttcttgcagagctttaaaaaattcaatcagtttgataaaagactggaagaagcagagaaaaccgaagtaaaatacaaaaagacaaatgaataaaacaatctttcccaaatccctgaaaaaaggcgataaaatagccattatttctcctgcgggagccgtagaatcttcccagcttgaaaagggaatcgaaatgattaaaagtaaaggtttcgaacccgttttgggagaacatctttacacgaaatatgcaaacggatacaattacgcaggaacggagcaggaaagattaaaagatatgaactgggcgctcaatgacagcgaaatttccgcagtctgggcttcaagaggcggttacggttgtcagcatctcattcagcatcttaatcttaaaaactttgccaaaaatccgaaatggtacattgggtattcagacaataccgtaatccagagttatttgctgaaaaaaggttttgcatcgattcacggacagactgtaaaaacatcgagctttggcgttaccgaagaaagctacgatcttatttttaatgttttaaaaggaaaaccccttaaatataccctttcctctcatcagttcaataaaaaaggaaacgttgaaggacagttggtcggtggaaatttagccttgatttatgcgcttttaggaacgaaatattcctttgattttaaagataaaattcttttcattgaagatatcggcgaaaatttttatgctctcgacagaatgatcatgagtcttgaattagccggagtttttaataaaatttcagggttgattatcggcggaatgaccaatatgggcgatgaaaaagaaaataaacaatacgaagaaagctttgatgaatttgcttacaagttagttgccgacagaatttcaaagtacaatttcccaacagttttcggtttcccgaatggacacatcaaagacaacagaccgttgattattggtggacatgtgagattggaggttaagaataaggcgaagattgagtttttagtgtgaggagtttattagttgattatagtttcagtccgggattatatgatgaaatccgaataatacatttagaaatttacagtgattacaattatatccttaagtttaattggtataaaaaatatcgtgataatgaagctttagatgaaaataattctaaaaattatagacaggaaacagtatttaatgatgttcttccaaacaggttaaaagaaaatttaaaggctttgctttcttttcacgactttgaaattaaaactttttatcctccattaacagaagaagaaaaaaaacaatatgccccacttgatgtaaggcatgaagattatcagttttacattgaaggaattaaattctgggttaatgtaagtccttacatttttaaaaagcaatttttaaaaacagaacaggaactgttgtttggaaaatttcatgaaaatataacagaatggttggacgaagtttatgaaaaattaatagatagagaaaatatttaataactcaaaaactctcaaacactttatctcaacaatggcagatcataacgattttggtaaaaaagcagaagaattggccgctgaatatttacagaaaaacggctacaaaattctggtaagaaactttcggtatcagaaagcagagctggatttggttgccgaaaaaggtagtttaattgtggtcgttgaagtaaaggcacgttctacctatgtgtttaatctcccacaggaagccgtaaacaaacgaaagattaagttgattgtttccgctgccaattatttcatggaagaatacaataaaaatcaggaagtacgatttgatatcatttccgttcttcccgacgaaaataaaaatctgatgatcgaacatatcaccgatgcttttgaagcatttgacgccaactgagtatgcagaatatacattgggaaacaatatacaacgctgtaggatacgttttaaagaattatcctttaaaaattgttcttttctgcttccttttccttgttttaggtttgctgataagttcatttctggtcatcatcctaaaaaaatacaaagctttatcgcgcagccagaaatactacaactggtttgttaaactttatattcctgccatttttattgtcaacatcgttttttctttaaaaataggtttattttgcggagtgtattctgcattaaagaaagacagttattccatttccgagcagatctataattccagtacatattatatctttaaagacaacagatctaaaaaagtttttattgaagatctcagaaaagcggttaaagatctcagtcagaaaaataacaatgcaaagattaaagtcattgatatcgcgaatgcttaccacgttaaaaatgatatgatagaccttccaaaaactggatggcttccatgtttgtgaatcggtatggagataaaatctattcatttattatatacggaattttggattccgttcctaatgggggtattacgaatgagctttcttatggagagtttaatacgatatcagaaaaacttgtagtactgaatcctgaaaatattgaaaaatccatcgttcagaaaattcagaatctgttcttaatgattttaaaatctcagtttaagaacattttaaaaggaattttattaatttgggtgcttttaatgtgtattccgtggtttgaattttggatctatacacttctgatgaaaagattaaaagaccataatacaattcaaaaataaaaagtaaaaatgaaaacaatattaattaccggagcaacatccggaatcggaaaatctaccgccgaacttctggcaaaacaaggaaacagaataattatctgcggaagaaggtcggaagttcttgaagatgtaaaaaatgaactttcacaatataccgaaatatttagtttaaaattcgatgtcagaaatcttgaagaagtggaaactgcaatcggttctcttccttcggaatggaaaaatattgatgttttaatcaacaatgccggaaatgctcatggattagatcctttgtctgccggaaaaacggatgattgggattctatgatcgacggaaatgtgaaaggacttttgtacgtttctaaaatgattattcccagaatgaaagaacgaaattcaggacatattgtcaacatcagttccgttgcagcgagacagacgtacgcaaacggtgtggtctattgtgctacaaaaaaagcagtagatgttatttccgaaggaatgcgaattgaactaacggaattcgggatcaaagtaaccaatattcagccgggagctgtagagacagacttttcgatggtaagatttaaaggagacagcgaaagagcagcaacggtttacgccggttatgaacctctgaaagcggaagatattgcagattccattgcctattgcatcaatgctccgaaacatgtctgtatttcggatatgacgatctacccttctgctcaggcggaaccaagaaccatccacagaaagtcttaatctgagtttgaacgatgaaacttttacccttcttactgtgcttctcttgtattttcgcatactcacaaaagtattcaaaagacgaaaaacaactcctttctcagactagaaaacttgattctctgatacagaataacgattcaaaagttttagatttgttcgaagatgatgtttctttcgggcattccaatggatggattcagaactattcggattttaagagagatttcagctcgaaaaaagtaatttatgataagattgaacagattgaaatttcagagcttaaaaaagataaaaatatctgctcacttagaagaaaaataaaagtttcaggaacctacaaaagccagaaattcgaaatgattcttgcattgctggaaatctggaaaaaagagaaatcggtctggaaactctggagcaggcaaagtgtggaaataaagccataaatttgcagggaaacaatcgatttgcattttgttgttgattttaaatttaaaaaatgaaaattctatatctcgaaacctcgtcaaaaaactgttctgttgccatttccgataatgaaaaactgttgtgtgtaacggaagaagtttctgaaaactacaaacagtctgaaagtctgcatacttttgtagaatgggctttggaaggagccggaatttccatgaaggaaattgaagccgtttgtctggggaaaggtccaggttcgtataccggattgagaattggggcagcttctgcaaaaggtttctgctacggactgaaaattccattgattgcggtaaattctatggaaagcatcatagagccttttttagaccagaactacgatttgatagtaccaatgatcgatgcgagacgaatggaggtttatacggcggtttatgacggaaaaacaggcaaagaaatttctgcaaccgaagctaaaattctaaacgaaacttcttttgaagaatttaaagataaaaaaatcctttttgcaggagatggaaccaagaaagcaaaagagattttacagcttcctaatgccgtatttgatgaaaattcctatccttctgcaaaatatttagtaaaaaaagcacttgaaaaaatagagcagaaagaatttgaggacattgcttattttgagcctttctatctcaaagattttcatggagtaaagaaaaaaaataaaagcgaagagtagtacttcgcttttatttttattgtggttttgccggaactgtatttacaggaggctgctgattgttattttgttttttgggcggtttgtttccgctgttgttcatcggctggctctgctgaggattattcatcatagtatttccctgcatttgcggcgaagtgccgattccgttattctgctgctgcaccggctgttgcggaacattgtttaccatatctcccggattttgaggcaccgcatttcctttattatcggtagcctggaagctcaggtcacttttcagataattaagcatttctttggctttttcgccttcaggtgttttaccgtaattcagggcaatctgttccagttgaagaatcattacctctttcccacttgcttttcctgagttaaatgcattcagcaaatataatttcggaaccagggcatccttcggattttgctggatcgctttttcaatgagatctttactttccccgaacttctcagattcatacagggcaaatgcctgtttgtactggttttccacatctgcggaagattttacgaaagaactgcttttaggatttcttgcaaattctgcatacgatgtgtaaggataatcttttaaaaggatttgttttgctctttcggcagcctgtggatttttttcataattcatggcgaaaatctcatacaaagcctgtaacatcactttttcttcaggttttacatccacaagatcatacagagtttttgtagctaaaggcgtattggtaaaatagttctgatacataactcccaaacctaaagaagcggtatctctgtcttttttaagctgatccagttttgcaacatctgtcggaatctgctctatgtagaaagccggttcaaaacgtctcggattgggtgctgcggtagttcctaaagcatcatttttaagatcttctatcgttgccattttcttggaaaaacgccagttgtctaccaaagctctgtctccccaggtttgcttaaaggtctgggttcctttggaaactgttcctgtattgctgaaatagaaacctttggttgccaccccgaaatcttcgaaagaatttgagctgttggcaaatatagaggttgcattatagtctccggtatcaaaacctttggatctttccgcgcgttttctttccagttcttccctttcctctttggctttaattttagcgatatatttattgaaaaaatctgttttctgatccggagccatttttgccagattcagaatactgtcattctttttgatcagataatagtttcttgaaatctttttgatgtacgtagactgatctgccaaaaggactttagaaggttcgtaagtcattaccgccaaagcagaatcataatacgctccggctccgatgtaatcatttttatccagatagcccttcccgatttcatagtacgcaagaccgcgaatttgcccgtcagacactttttccttcagagattttctgaaaaattcctgagcttcctccttctttccggctttgttcgccatgagtcccaaagcataataaaattcgttctttcgggagccgtaagttccttttttactgatgtcttcaagatattttcttgctccgctgtaatctccgtttccgttgaatgttttggcaatttcgatctgggattttacctcaaattcaaaatcattggcgtatttgtaagcggccataaagctttcgcgggctttttcattctggttaagaccctccagaacctgccctctcagataagcaattcggcttttcagctttctgttgctgttcagttcaaaagcattatccagttcttttatggcttcttctttttttcctgcatccaaaagagattctgcatagtaaatactcagtaatttctcgtattgcttggaaattttgtcacctttcagtttggcaaaagtttcatgagctttatggtagtttttgatctgatcatatgctaaaccctgataaattcttgccagaggaagtcttttatcatccttcatgtgcgtgaaaacataattcagtgcatcaagtgcttccaaagattttcctctgtaaattctcgcctgtgcaagaatcatgtacgcatcgaaaatctgcttgttctgctcttcaccatgtcgaatcacagaatatttgttgatggcttttaaagcctttgcttctgcaatttccagtgtggtagctcctttctgttccggctgaccggagtctcctgtagccattcctgttgcacccgacatcggatttccgggcattcctgaaggcattgcgggaggacggccgccgcgggaatcggtattttgctgaggacggttgatctctcccattttcatggagttttctgcaaatgcagcagactgtcccagatcacttcccaaaggctgatcttcatacgtaagaatcgggatataaggcgcataaaaattgtctttatgccccttgtcgcgggtctcaaactcattatttaaagcatcttttgcattaaataacgtgttgtaatatgtggtaaatcctttcataaacttagaccgctgttcaggcttttttacctttgtggcgcatgaagcaacgatacagagtatcaaaaggaataaaatattctttttcattattaaatataactcgctaatctactttttattatcagtaggattgatgattttgtaaaaataataaaattttatggggaaactcgttatatttctttcaaaattttgtaaaccaaatgagtaggaagtcccatgatcgtataatagcttcctgttatttttttgatttttgccattccgagccattcctgaataccgtagcttccggctttgtcgaaaggtctgtaatttttgatataatattctgtttcatcatctgtgatttcatccaattccacatcggcaacatcggtctgtgtaatggttttatctgaggtttttatggtaattccggtgtaaacctgatgtatttttccggaaagaagctgaagcatctgtttagcttccttttcatctgatggttttcccagaaactgatgatcaattgctacaaccgtatctgcggttaacagaacttcatctttttcaagatttcggaatgcatctgcttttaattcagataaataagcggcagactcccctactttgatgtgttcgggaacaatttcttcacaatcaatctttaccacttcaaattcaaaccctaaactggtcaaaagttcttttcttcttggagattgtgaggctaataataatttcatttacagtgaattaagtagattgtgtatcatcgtcgtcgaaccagtttccctgaactttcatcacctgttcgatgacgtctcttacagccccgcttccccctttgatgggcgaaatataatcggaaatggcttttatttcgggaactgcattttcaggacacgcagaaatggcagaacttttcatgatctgaagatccggaaggtcatcccccattgttaaaatttcatcgtacttcaggtgattttttcttctgaaatcctcaaaatctgccatcttattgtgggattttgcataataatcttcaatacccaggtaattgattctgtgttttaccatttcatcatttcctccggtgatcactccgattaaataattgttttttaatgctttaactacggcgtatccgtccagaacattcattaccctgcacatatttcctccgggcataagatacacgcttccgtctgtaaaaacgccatctacgtcgaatacaaacgctttaatattttttaatttctctttataactcatacattttctgaattgagtgattcattgtcttataaatttccagactttctccatgcagtaattgttcgtgcagctccagtatttttttgtcgttccttactgcgggaccggtctgggcagatcggggctcaatttcgtaaattttttgtacagtttcatcaatcaatggtaaaaaataaccaaaaggaatttcctgcgaatctgaaatttctttagcccttgcaaacagatggtttacaaaattacaggcaaaaactgcggtaagatggatgtattttcttttttcatgggtactttccattactttttctgaaatcttcgaagcaatttcaaaaagtgtttttttatcctgctcgttttctgtttcgataaaaaaggggattttagaataatccagttccttggattttgaaaaggtctgcaaaggataaaaacttgccttccgataatctccttttaagctttctttgggtaacgatccggaagtatgaacaacaagacaatcttttttgggaatcatttctgaaacctcttcaacggagttatcacttacggcaatgatgtataaatctgaatcgactaaatttttagttgaataagatgttcccaattcttcagacacttttttcaattcctcttcattccttccaaaaatctgagccaaaggaatcttattctgaacgaatgcttttgccagatgataggctacatttcctgaaccgataattacaatttgcataaaacaaatataaactttctggtttgatttaaaagtgaatatttaattttcaaatctaaatctgaataacgattattgtatggtgaattttttattcagagccataaatttctttattttaaagtaattctaaggatataagattatcaataaataagaacacaatgaaaacgtttaaaataattcatatatttaataaagatatttggactaaaaattgaaggagtaatttaactttcagttatttttgtaatccaaaacaatgaaagcatcctatgaagattaaagacacggaaattatttcgttgatgcaagatccgcgaactcaggaaaaaggagttcgtgcactgatggatgcttatcagagtagattgtattggcacataagaagaattattgtggacggagatcttgcgcaggacactttgcaggagacttttattaaagcttatcagaattttcatcagtttaaaaatgacagccagttgtacacatggctgtacagaatcgccaccaatgaggcgctgcagcagattaataaactgaagaaaatgcagaagaccgatgaagatcccgaatatcatatgcagaatcttattgcagataatacagacggagatgcagaagagatacagattttgctgcagaacgccatacaaagtctgccggaaaagcagaaactggtatttatgatgcggtattatgatgatttgccttacgaagagatatctaaaattgtagatatgtccgtaggaacattaaaaacaaattatcattatgccaaacagaagattgaagaatacatcaaagagaattacgaaagataatttttgagaaaaaacagcatgaaagattttgatctggaaaaattagaacgcaaaaatatatacaaagtccccgaaaatttgtttgaaaatattcaggggaaggtattgagcggaatgaatgattttgatctggagcaattggaacgtaagaatatttacaccgttccggaaaatgtatttgaaacagttcagaataatgtggtaaaaaatattctgcctgtaaaaaaagcaccggttttcagacttaactgggcttatgcagctgcggcatcacttgccttgatttttggagcgacttttgttttcaacaacggagattctgcagatcaggtacagcaacaggttgcagcaaacaatcaggagcctaaaacggaaagccagattgcttacgaaaccttaaaatctgatttaacttctgttgaaaataacaatcaaacaggtagcagtcaggacaacaataagtctttagcgaaagaagaaaaaccggctaaggcggcagatgaagcaagaccaaaatcttcaccatctgtttcgaaacaaaatgaggctcagatgaacgagtacctggattccttctcaaattccgaaatttcggaactggcaagcaattctacacaggacgtttatttggacttgtataattaaaagaaaatgaaaaagatattatttacgctttttattatctatagttttggtctgaatgcccaaaggacagattatgactggaagaagatggatcctaaacagagaaaggagatcatcaataatctttctcctgaggaaagaaagaatctcctgatgaagttcaggaataatatggtgatggataatctggatattgatcccagtgataaggaagagtttaccgatatttataatgaatatctggaaagccagaagcagataaaaagtcagtttaattctgattttaaccctgaaaacttatcggatgaggaggcaaaagccaagcttcagcagagttttgaagtagggcagaagctgctcgataacaggaagaaatatgcagacaaaatgcagaaagtaataccatgccaaaaagttttgaagcttttccagtctgagggaatgatgagagataaaatgaacgaaagaaaacctcacggaaataatggcagtaatagtgcttcaagacaaaacccataatagtttatttttttaatgttggacgaccctttcaatttatttgtgagggtcgtttaattttaaattaaaactatatttttgcgaaaatttttaacgatgaagaagataattctgtttttgatgttttcgtgtattttaacagcgcagaaaactgaatatataaagctcaaccaaagtattaaagataaattctcacgggtaaagtctttaaccctgattgataacagaactgaaaaagatttaggaactgtaacctacaaaaaagaaaatgttcagttgaagtttgaaaatgaggatctcaaaaaatatgttgaagactggtttgcaaacgataataagaccaaaggaaataataacgatattgttttgttgttggaagaaatcaggattgatgattttaaaaacacaggcttggcaaatgcaaaggttaaaatcagcagttttatcaacaggaacggcaaatattatttcattaaccgatacaacagtacggtaggtttcaattcaaaattaacgcccaacatcccaagagtaatatctgtagccatagaaactattttttccactttaattaaagattcttactcgcatatcgctttgagtactccaattgctgagtctgatcttcataattatgaggaaatcgtaggcaaaaatatcaaatatcttacggttcctgaacttacaaacggagtgtataaagatttcagatctttttctcttcaaaagccggaagaaggatattatgtagataaaaataaaaaaggaaaagttatcgggattaaaaacagggaagatcttcttttatccgccgagtatgtttttggatatgtggaagacggaaaagcataccgacttacgcctgttggcttcttagaaatgcagaaagacgataaaggatattatgtagtttcttcaagacttgagctgtttccgcctcagaatgttaataacggcgttatgattggtgtaatgatgggcggaattgtcggcggactgatcggtgcagcactcgattccggaaaagccgcaagagataaacctgaaaatttgtctaatatttacatcgatccgcttacgggagaatatatttttacgaagtaattttaatttaaaattttaatgatgaagaagtttttgcaggttatcatgacttgtctggtgattgtttcttttgcacagaataaagaaatcataaaactgaaaggaagtattcccaataatggagaaggagattacaacacattaattgttattgataacagaaaagataaaaccatcggagttctgccttttggagatggcaaagaaatgaaagaagtttcctttcagaacagtccggaagacgatttttccgaatggttccgtaaaagcaatctgaagggagggaagcaggatcttgtgttagttcttaatgatcttaaattatctgtaaaagaaacgtacgaaaggaaaaacatcggaaccatgaaattttcccttcaaagctttgtgaaagaagaggggaagtatcattttctgtataaaaaagacaccactttcaagttcagtcacagagatgttgccgatgcgatggtgagaaatatgcatcatcttttttctttgtatcttgaaaagacatataaatccaaaccttcaaaatatgatcttaccttggatgatatttccaattatcaaagctatgtaaataattatcctgcttttaaaaatgaaaccctgaaagaaggaatctatctggattacaattcgtttttcaggcagactccagaagaaggctacactttggagcgatgggaaaatggaacattagacagggctgtaaaaaccgaaaacggaaagaagatgaaaattccttcccgtaaaatgtttatctatgtagaaaacggaaaagcgtttaaaaatacctattcaggatttcaggaactgttaaaaaatgaaaaaggattttacattgtcgcaaaaccttcaagtttatttccgcctcaatatgatattaaattaggaatcatgtttggattggtcggcggaattgcagatgcattactttttaatccgaataagctgagccataatcctcaggaaatttacatcgatccgatgacaggcgagtacgattttaatgatatttttgatcaattaccataaaaaagagagacatagcgtctctcttttaaactttctgtcaattaaaaagattctttactcagcaaaaaaaatattcagcactttatggcttgtaaattgatactaaaaaatttaccgaatttcagatggtaaatgaacaagtcgatcgtaattttagctcttatttttaattgtttcttctttttccatgcacaggaaaaaaaagattcgatctattataaaattgaaaaattttcagataagagaaaatttaccaaattccttcaccgttttatatttcgtagagaagcagattccgtttctgtaaaaacaaccaccgaaaaagtggtgcaggaaacgcacgacggaaaatacatcagaaatattaaaatcgaaaccatagatcctttcggatacggttctcaggacaaaaaagaaaaatccagatggtacgactggtttaccaatcatcttcactccaatacaagaatttccactgttaacaactatttacttttccaaaaaggagaagaatacaatgcccagaaaatctatgagtctgaacgtctgctgagaaccatgccttttatcaacagagtgaatatcagtatttccgacagtacttccactaaagattctatagatgttatcgtaaaagtgctggattcatggagtctgaaacccagagcaagctattcaggaagtaaaatcgggttaggcgttaccgaagaaaattttctcggtctgggacatgatttaagttttctctaccgtaacgattctaaggaaaagcagaattatttactcggaagttacaccgcatacaatttatggggttcctacatcaatgcgcagattttgggagaaagggattttgccagaaatgaaagaatcagcttcagtgcaacgcgcgattttttctctcctttaacgaaatgggcaggaggatttaattttgaatattttatgcgccgggttttgctgcctatagaatccgaaaccgtttttcctgaagctcagattaaagtgtacagtcaggatttatggggaggttaccagattcccattgcctcaaaaacttcagaaaaagtttccagcaatattgctttaatcggaagatttcagaattatcagtacaaagacaatcctgcaatagacaaatatgattactttacctcttacagcagttttctggcgtctgtaggatttatacagcgaaaattctctgttcagaaaaatatctttcagtacgatcttccggaagatattgcgtacggaacttcggcgagtcttacagcgggaggtttatcaagaagcaacagaatcattccgtatgccggaatttccgtggcatacggagattttaccgacatcggatatttcagtgtgaaagcacaattcggaagattcttcaacgaagacagacaaaacagggagtctttccggttagacggaacctatttcaccaatcttatggactggaaatttgccagtgcaaggcactttttttctcccacgttagccttaggaaatccgcagcacaactattcttacagagaccgcatcaatctatccgcaggcgatgagtttccggtgtacagcgcagattatatcgggacaaaaaaactcgttctgcgatatcagcttcagcttttcgttaataaaacctggaaaaactttcatttcagtccttacttaacagcagcagcaggctggttggcaatgcccgatgaaaaattattaaaaacaaacgtcaatacaaaaataggaatcggtgttctcattaataatccttttctggtcttcaaccgcatccagatttccttcacctattatccaaaagttccttttgacaataattcattgttcgatttcaacagcaaccggaacaaccttttgccaatgaacggctttaccacagacattccgcatttcgtgaattttggaaattaaaaaggcttaaaattaaatttttgttcttcaaaatttacactaaggaattatcctgcattttgttatctttgcaaattacaagattcttaaatgaaaaacatacgaaatttttgcataatcgcccacatcgaccacggtaaaagtactttggcggatcgtcttttggaatataccaatacggtgactcagagagaattgcagtctcagacactggatgatatggatttggagaaagaacgtggaattaccataaaatcccacgccatccagatggattatgaatacaaaggagaaaaatatattttaaaccttattgatacaccgggacacgtagatttttcttacgaagtttcccgttccattgctgcctgcgaaggagcgcttcttattgtagatgcggcacagagtattcaggcacagaccatcagtaatttatatttagcactggaaaacgatttaaccatcattcctattctgaataaaattgaccttccttccgcaaatcctgaagaagtaaccgacgaaatcatgaacctgattggttgcgactatgaagatgttttaagagtttccgggaagacaggagaaggagttcaccatttgcttgagcagattgtagaaagaattccggctccggtaggagatccggatgcgccgcttcaggctttgatctttgattcggtttacaacccgttcagaggaattgaggcttactttaaagtggtaaacggaagtatttctaaaaacgaaaaaattaaattcttcgcaaccggaaaagaatacggagccgatgaggtaggaacactgaaattaaagcaggttccgaagaaatcggtagaatgtggagatgtaggatatctggtttccggaattaaagatgctagagaagtaaaagtaggagatacaatcacttcttttgaaaaacctgcagcaggaccgattgaaggttttgaggaagtgaaaccaatggttttcgccggaatttatccgattgattctgaggattttgaagaattaagattctctcttgaaaaattaagactgaatgatgcttctctggttttcgaacctgaaagctctgcagcacttggttttggtttccgttgcggattcttaggaatgcttcacatggaaatcgttcaggaaagactggacagagagttcaacatgaacgtaattaccacggttcccaacgtatcttacttcggatataccaaaaaagaacctgaagttccgattatgattaataacccatcggaaatgatggatcctaccacgatggacagagtagaagaaccttatatcaaagcttctatcattacaaaatcagattttgtagggtctgtaatgacgctttgtatcgaaaaaagaggagaaatcgttaaccagagttacctgacttcagacagagtagaattaatcttcaatatgcctttggctgaggttgttttcgacttctacgacaggctgaaatctatttctaaagggtatgcttcattcgattatcatccgattggtttcagagcttccaagcttgtaaaaatggatatcctgatcaacggagatatggtagatgctttatcttcattgattcacgattcgaacgcttatcatattggtaagaaaatgtgtgaaaaacttcgtgaattgatcccgagacagcagtttgatattgccgttcaggcagcgttaggaacgaaagttattgcaagagaaaccattaaagcgttaagaaaagacgttaccgcaaaatgttacggaggagatatttccagaaaacgtaaacttttggaaaagcaaaaagaaggtaaaaagaaaatgaagcagattggtagggtagaagtaccgcaatcggcatttatggctgttttgaagctgaatgattagtgaaagagccaagtaaaaaggcaaaagataaaagtaaatccgcagaaattttctgcggatttttttattgagattaatatttttattttttcgtgaacttgatttccattgttttaaattcttttcctgttttagaatccggtccgtacatttccattttttgggtattatcatctacgaaagtgaaaacttctcttacctcacagtcttttccgggtcttgatggatctgtcatttttcctttaaattcaatagattttgttgacggattccaatcgccttccatattcataattcctgttcccatattgtcgatccacgtacttacaaatttctttttagaattgtcataagccagaatgctcattccttcaaatggcattcccatgaagtttcctttgtgattgcttacctgataacgaccatcgaaaaccattttgttggtaacttcagattggcttatcattggttttccgccgttttccatccacatggtattttctccagaccaatttccgtcagattttgctaacattttgtgcatttctcccggagttgcatattctatccaggcttttgttgcagttgcagaatctacgggtttccattcttcattggttaaagaatctgttttatctgagtctgtttttgccacagttttgcctttatcacaagagaaaagtagaaaaaaggtacaagctgtaaaaaataaatttctcataattgtttagttttaagttgattataaatttaaataaaaattgtctacaaagaataattatttttatgttgatattcatgattctaaattgtaactttgtgtattcataacgcaaattaaaacaatggaatctccaaaaaaattacaggatataaaagtggctgtagatgcagtaattttcggatattttgataaaaaagatctgcagatccttctcattaaaagaaacatcgagcctttcaaaggaggttgggcacttcccggaggtctggttttggatgatgaaaaccttgatgatgccgtaaaacgcgaactccacgaagaagcaggaataaagcccgattttttagaacagctttacacttttggaaatgtaggtcgcgatccccgaaaccgcgtcgtttctattgcttatttaggacttgtcaatccatcctatcatgaattgtttgccgattctgatgccgaagatgcacaatggttcagcgtcaatcagcttccaaaactggcttttgatcatcaatccattattgatattgctttaaaaagacttcgtacaaaactccagtatcagccgatcggatttaatcttttaaacgatgaatttgccttttctgatcttgaaaacctatacaaaaccatcatcggtaaagaaatagaccgccgtaatttccgcaaaaagatcatgagctacggattgcttaatgaaaccaataatcttaaaaaagaaggcagcggaagacccggaaaactcttcactttcaatcaggaaaaatacaaggaactggaagagcagggattttatttcgaaatcaaatagttttttttaaacacaaatagcacaaatatttacacgaattttcacgaatgattcttttgcgttcgctgtcattcagaatgaagcgaagcggaatgaagaatctttaaacttaaacataataatagattctgtgaacttcgttcgcatcccttaaggctgtgtcagaatgacacattgtgtgtaaattttaccctctatattaattgattaaaaatttgtgtcctttgtgaaaaacatttgcgtcattcgtgtttagataaaatcagcttaccaagtcaattacgattccaatttcaatatcaatagaaacggacttcagtccgttatttcaattaaaaaatttcaattggctttagcctaaacataaaaccaataaatacttgcgtcatttgtgaaaaacatttgcgccatccgtgtttaaaaaaatcagcttaccaagtcaattacgatcccaatttcaatatcaatagaaacggacttcagtccgttctttcaattaaaaaatttcaaaccggctttagcctgaacataaaaaccaataaatacttgtgtcctttgtgaaaaacattgtgccccttgtgtttaaataaaaaaatttcaaaccggctttagccaaaatctaaagcataaataaattttgcgccatttgtgaaaaacattggtgttattcgtgtttcaataaaataaatttttaacactgaaaatcaagtaattaaaatatttagcgtaaaaataacacaaataaatttggaagataaaaccagattcctttaaatttgtgtaaaaataacgcaatcatgaaatatacattaagtaataccatcgaaaaatttcatcaaaaagaaaatccggaatttcttttcttttggggacataccgtgaaagatgaaattacaaaagcctgcttcagtcagtggtttccttttgagtttgaagaaaacggaaacatttacaaaacagcagaacattatatgatggcaggaaaagcgagattatttaatgatcatgaagttttagagcagattttaaaagcagaaactccgaatcaggcaaaaagtttaggcagaaaagtcagaaactttgatcctcaaatttgggacgagcataaatatgaaattgtaaaacagggaaatctattaaagttttctcaaaatgaagagtttaaaaaattcctgctttcaacagacgatagaattttagtagaggcaagtccgtacgataaaatctggggaatcggaatgctggaaaccaatgcaaaagcaaaagatccttcaaaatggaatggtgaaaatttattaggatttgctttaatggaagtaagagacgaattaagagggtaaaaacacaatagccgtaaaccaattagaaatcatgaaaaaaacagagctccatcctcagatatttttaatagaaaatttcctttcggatcaagaatgcgatcattatattgaaatgacgaaggataaagtctttgaggaagcgaaaattaatatgagaggtcgacaggttatgagcaaaggaatccgaaacaacgatagattgatgatttttgatgaagatttggctaaaaatctttttcaaagagcagttgaatttcttcctcagattcatgacaattatgaagtttcgggatttaatgaaatgttcaggatttataaatattctccgggacagcagtttaaaatgcaccacgacggaagctacatcagaaatgagaatgaaaaaagcttttacacttttttaatctatctgaatgatgattttgaaggcggagaaacagagtttgaaaatctgttcactgtagctccaaagaaaggctctgcgtcggttttctatcatcctttgagacacgaagggaaaacactgatcagcggacaaaagtatgttttaagaacagatgtaatgtatttaaagacttaaaaatgaaaaagatctatgtttcaggaaacggaaatgtatcctgggaaaagtttcagcagttttatatcgaaccgttaaagaaattcagccttgatgattgtgaatttatcattgggtatttttcgggaaccgatacattaatgatggaatttttaaaaggtaaaacagagaacgtaaccattcttcatgttggaaaaagacccagatattttgccaattcttttaaaacaaaagcggaaaaatggaaagttatcggaggatttacttcaaattatgaaagagatacgtttggaattgatctatgcactcattttctggcggttgatttcaataccgatgaaaaaagaaaaagcggaacattaaaaaatatcgaaaaatgttttgctttaaataaaataaaagtgtaaaaaattttacctataatttgcgtaaaaaatacatgaaaattaacaaattgtttcactaaaaatcataaagctatgtttggatttacacacatcaaatttgattctatgacgtacgttcttcattttaaaaatggaaagatcgccagagaaggaagaggtttatcgttcttttatttcgctcccaattcgtctattgtagcgattccgttgggaagcaacgatctgccgtttatctttaatgaaaacacgaacgattatcagactgtgaaaattcagggacagatcagctataaggtgaccgatccgaaagcactttccaacacgctggattttaccgtggacggagagggagtttataaaaagaatgacattgaaaagctgaaccagagaatcatcaatctcgcacagacagcgacttcatcattcattcatcagctcaatttaaaagatgctatccgttctgccaaacagattgaagagaatattctgaaaggattaatcgattccgaatccataaaaagcatgggaattgaaattctgggagccaatattttagccgttcagaccactcctgaaatggcaagagctctggaaacggaaaccagagaaaaactgcaacagcaagccgatgaagcgatttatgaaagaagaaatttcgcggtagaacaggaaagaaaaatcaaggaatctgaactgaacacggaaattgctgtggaagaaaagcaaaagcagattgaagaaaaaaggatggaaaccgaagttcagcaggaagaaaacaacagaatccttcgtgaaatgaaaattgccgccgatatttctgtagaaaaccagagaaaaaaactgatcgagcaaaaaacggaaaacgacagaaaagaagcagagactcaaggttatattctggaaacttccttaaaaccatacaaagaaatcgactggaaagtcctcactgctttgagtggaagacaggatgcgagaaataacatcgctttagcgttcagagaattggcagaaaacgcagggaaaatcggaaacctgaacataagtccggatttgttggatagtattttgaaaaagtaagaggctggaagagggaagagcaaagttggaagcagttaacagtctcaaaaaaaggataaaataggttatcgtctatgctgagcagagcgcctttgcgaaccttaaaaacagttagtagtaaaataaaaactttgcggactttgtgtcaaaataaaaacttctgaataattaaaaaaatgaaagtagaatacgctatcatcatcaaaaataaaacccgtcttgagtctctggtcgaaagattcaacacgcaggctcaggcgaagttttatattgaaagttccggaggaaattttcaggaatatgtggatgaacacgaaaaattcggtcagtcatttgtgaaagttcaaacccagctttccaaaatcattaaaaataaagtgattgaaagagagtttgttccctcctatattttctccgaaaacaatctgattgtggtggtcggacaggacggtttggtagccaatgttgccaaatattccaaacatattccgatcattgcggtgaatcccgatcccgaaagatatgacggcgttttgcttcccttcaccgcaaaaaactttttaaaaggagtgcaagctgtgatgaacggaaattttagttcaaaaaaaatgaagtttgccgaaacagtgctgaatgacggacaaaaattacgggcggtaaatgatttatttgtaggaatttcctcacattcttccgcacgatataaaatcatgctgaacggaaaacaagaaacccattcttccagcggaatcatagtttccacaaaaacaggaagtacaggctggctgagttccatttttaatatggcatttggaattttaggcgaaacagctttaaaatatccgcagatgaatgaagaagatttgtattttgcagtaagagaacctttcaaaagcatccgaacgcaaaccgatatctgcagtggaaaattaagaaaaggaaacaaattaatcatcgaatcactaatgccgaataatggttttatatttagcgacggaattgagcaggattttctacagttcaacagcggagcaacagcagaaatcaggctttctgacgatgaagcagttttagttttaaattaaaaaccaaccatgaaaacaatgaaatatttaaaagtgaaacaaaaaaacaacaaaccctcagaaatttaaaacttcaccttgaaaaactctttgtgatcttagctaagtgaaacggctttgcgaacttaaaaacatttagtagtaaaaaaaacttagcgggctttgcgttaaaaaaaataaaaacaaaccatgaaaacaatactatatttaaaaggcgatgtaacaaatcctcaagtttaataaaatagatcattattcaaaattataaatatagcagaactctgagatcttagctgagtagaacgcctttgcgaacttaaaaacgtttagtagtaacaaaaaactctgcggactttgcgttaaaaaaataaaaacaataaaatatttaaaatgcaacgcaacaaaccctcaagttaaagggaataaatcattattcaaaattataaatatagcagaactctgagatcttagctgagtagaacgcctttgcgaacttaaaagcatttagtagtaaaaaaaaacttagcgggccttgcgttaaaaaataaaaacaaaccatgaaaacaatactatatttaaaaggcgacgaagcaaatccacagtcagaaggaaacagatcattatcaaaaattataaatttaatagaactctctgatcttagctgagtagaacgcctttgcgaacttaaaaacgtttagtagtaaaataaaaactctgcggactttgcgttaaaaaataaaaacaacatgaaaacaacaactttatacagacccgtgggagaaaaagaaatgctcttaatcatcgaaagcaattacagaaaattccctccaagattaaactggcaacccatcttctaccccgttctgaatgaagaatacgcttccgaaatcgcagaaaaatggaacacacgagacgaagccggaaattatctcggttttgttacaaagtttgaagtttctgaggaaatagtcagcaaatatccctcacaaaacgtgggagcaagaaatcacaacgaactctggattccttccgaagaactcgaagaatttaatcaggcaattgtcggcaatattgaagtgacaaaagttttcatgggaaaagacttcaaaaaagcagcaaatgaacaactggaaaatctattggcaaacattaaaaaactaaccatgacaaataaaggaatggcgaaagataccctggaaatcttagctaaaaaatattatatcaacgaaaacaacgaaaaaatcagcatccaaaacgaaatggaaacatgtattaaagaaaccgttttgtattcctcggaagaactgtcggaaataaccgaaaacgaacttccggaaacccacttcgagactcagtttgaagtctggagatgcagttccctgaaagccattttgcagttagctgcggaagaagatcaggagaagctcatgtgcctaaattttgcatcagcaaaaaatccgggtggtggtttcatcagcggagccgaagcgcaggaagaaagtctggcaagaacttccggacttcacgacagtctgcttcagggttgggaatattacgaaacacaccgtgcgatggaatcatgcttttatacagatatgatgatttacagcccgaaagttcccgttttcaggaaagataaaggagaattgctggatcagcctgttttgtgcaatttcatcacctctcccgcagtgaacgcaggcgttgtaaaacgtcaggaaccggaaagagcggatgaaattttcggagcaatggatgtaagaacagataaaatgcttgctttagctttaaacaaaggaaatgaaaccttaattttaggagcttggggatgcggagttttcaaaaatgatccgaaagaaattgccgaattattcaaaaagcatcttcttgggaagtataaaaataaatttaaaagagtggtctttgccattctctcgaaaaaggaggaaatgataaagccgtttgaagaaatatcatgaaaatcaatttaaaaaaatataaagaacagctacaggattggccggaaaaaggctatcatataatggctcagtatgatgaagataaaattattgtctaccagtcgtatcggaaagaaataggcaattttgccgttaaaaatcaatattttggcggagcattcagtttggaaagaatgacctggatcaaaccgaacttcctttggatgatgttccgaaacggttggggaacaaaagaatgtcaggaatctgttcttgccattcatttgaagatggatgcttttaaaaattatctgaaaaacgcagtctattcttcatacaatgaaaaattagaaatttcaagggaagaatggcagaatcaggtgaaagaatcttccgtgagactgcagtgggatccggatcacgatcctttcggaaacaaactggaaaggagagccattcagattggtttgagaaatgatttcatcaaaacctttgcaaaagaagacctccttttcattgaagatatttcagattttgttaaagaacagcatcagtttgttttgaatgacgatttagacaatttagttcttccggaagaaaaaccgttgctgtttgatgatgaggatttaaataagaaattaaggttaaaataatgaaagataagctcttactcgcttcaaaatcacttacggggatttctattggtgatgcttttggggaaagtttctttggtgaagaaagtatgatcagaatgcacatccatcaaagaatcattcctgaaaacactctggattttacggatgataccattatggcaattgctgttttcagatcattggaaaaattcggacaaatcaatcaggattttctggcggaagagtttacccaaaattattattttgatattaatcgaggttacggaccttcaatgcatcaatatttcagagcagtaaaggatggtgaaaaatggaaagaagtttcctattcaaaatttggaggacagggttctatgggaaatggaggagcaatgagagcctcagtaatcggagcttatttttatgatgatctggatcagcttaaaacaaatgcagaactgtcctgtgaagttacccatgccaacaaagaagcgatggaaggcacaaaagccattgcattagctgcagctttggtcattcaggaaaaattaggattgatacggttgaatcagcaggaatttattcagaaaattcagtctgaattgaaggattctgatatgaaaagtaaactgaacaaagtcttatatttagacggaaatccaagcattgagttattggtcaaaacattaggaaacggaataaaaatgaccgctcaggacactgtgccgattgtactctggatgctttcgagataccggaacaatattgaagagtgtctttggaatacggtttccgcgttaggtgacagagatacaacttgtgcaatggttggaggaataagtattttaagctgcaatgaagagtcaattcctgattggacaaacaatgttgaggattggaaaaaaagcaaattttatggaaattgaattaacaaaaggcgatatcacccaaattaaagcagatgccatcgtcaacgcagccaactcttccttattaggcggtggcggagtagacggtgccattcatagagcaggaggaaaacaaattcttgatgagtgtatagaaatcagaagccgacagggtaaatgcaaaacaggagaagcagtcgttacaaccggcggaaatctccctgcaaaatacgtcattcatacggttggtccggtttggaacggagatgaagaaaaaggttcgaaattattggcaaactgttattataattcattgaaattggcagaaagtctgaatgttaaaaccattgcttttcccaacatcagcacaggaatttatcggttcccaaaagaactcgctgcaaaaattgccatagatgaggtgagaaactttacatcggagatcattgaaaaagttattttcgtatgttttgatgatgaaaatgaaaagatttacagaaaattattagaagaataaaattaatgctcatttgctgagtcaaacgcctttgcgaacgaaaatatgcaagataatttgaaacagaatctttgcggacttagcgttaaaaaaaataacaaccaaatgaaaaaactaaccatattaaccggcgccggaatcagtgccgaaagcggaataaaaaccttcagagacggagatggtctttgggaaaatcataacatcacagatgtggcaagtccggaaggatggcgaaaagacagagctttggttcttgaattttacaaccagagacgaagacagcttcacgaagtagaaccgaatgatgcacaccgattattggcagaactggaaaaacattttgaagttcagatcattacccagaatatcgatgatctgcatgaaagagcaggttcaaccaatattttacatttacacggcgagttattcaaatcctgctcgtgcaacaataaaaacctgatttacgagcagaaagatgacatcaacatcggcgataaagcagaagacggagcgcagttaagaccatttattgtctggttcggagaagatgttccgctgatgaaaaaagctacgaaaatggcaaaagaagccgatatatttttggtaatcggaacgtctttacaggtgtatcctgcagcgggattaattcatgatatcaaggatgactgtcttttaatcgtaatcaaccccaacgaaacgggtttcgggtacggaaagagagccgttgtcatgaaagaaaccgcaacacagggaatgaaactgctttttgacaaactggtaaatcttgcataatggataacacaataaaagccggaattttcggagtttgtgtgggtgatgctttaggcgttccggtggaatttaaaaccagagaaactttaaaaacgtttcctgttgaaaatatgcgtgaatttggatcgtggaaccagccgaaaggaacgtggagcgacgacagttcgttaacgctttgcattgcagacgaactcacaaaaggttatgatctggaaaaaatcgggcaaagctttgtgaagtgggtaaaatacggacattggacggctcacggaagattgttcgatattggcggaacaacaaggcattctgtcgcgagattaataaaaggagaaagtgcaaaattttcgggaaatattttcgaagaagataacggaaacggttctttaatgagaacacttccgttggctttctaccttaaagacgaagaaaatattgaaaagctctatcagacggtaaaagaagtctctgcaatcacacacggacattttcgctcagtatttgcctgctttgtttatgtaatttttgccattgaattaattaagggtaaagataaaaaacaaggatatcatcatactcaggaagtggtgttgcaatttgcagaaattcaaggttttaacccgaaagaaatacagctttttgacagggttttaaagaatgatatttcagaatatcatgaagattccatcagttcaggaggctacgttcttcacagtctcgaagcctcattatggtgcttcctgaactctgaaaattatgctgaagctgttttaaaagccgtcaatctgggagaagataccgatacaaccggagctatcacaggaggaattgccggaatatattatggttttgaaagtattccgaaagagtggattgatgttttggcgaggaaagaggatattggaaaattgtgtgagaaattagaaagaaaattaataaacaaaccatgaacgaacaacataaaaaaagaataagcaaatacctaagcttggtgcttagacacaaacccgaagttatcgggctgaatttagacgaaaacggatgggcagatgtggaagaactacaggaaaaatgtgcaaaacaaaatcgcgctttcacactggaagaattggatgaggttgtggaaaccaatgataaaaaacgctttattttaaacgaggataaaaccagaatccgcgcaaatcaggggcattcaattgatattgatctggcgctgaaaccacaacagccaccggaatttctttaccacggaaccgcagaaaccaatcttgcatccatctttgaaaaaggaattgaaaagagaaacagacagcacgttcatctaagtcaggataaagaaaccgcaaccaaagtcggaatgcgtcacggaaaaccagtcattttaaccatagaaacaggaaaaatgcacgaagacggaatcgtattctatctttccgaaaacaaagtctggctgactgattttgtggatgcagaatatatttcgaaatgactgctcaggaatttgatgaagccgtaaaagacttttctccggataaagatgatttaaaagaaaaagttaatgaattatttggaaaaggagcgggaaccgtacgtattttatactttattgttgaacataagaattgcagattagttgaagcaatggaaattgtggaatcctgcccaaattatcacaacagatttaaataaatgaaagattgccaatttgaattatacagcttaaaaacagaacatttgaatattataattaccttttcaatagaagataaaattgtaatttacggatgtgaaagtggagatgtggtaagggaaattacgggcaattttgattatgagtattatttaacaataaatagattaaatctgattcagttgaaattaatgaaaggcttaaaatcttttgaggaattgaaagaattcttcattaaaaatttttctggggaaaactgtattgaagaggttaaaaaattttgctttcaaaattttataagatatgaatttagtgtttggagataaaatatgaaaagaacattagcaataggcgatattcacggaggattcaaagcattgatacaggttttggacagagccgctgttacagaaaacgacaccctgatttttctcggagattatgttgatggctggagtgaatcttcgcagatcattcagtttttaattgaacttgccgaaaagcaggaatgtatttttatcaaaggaaatcatgatgcatggacggaagactggcttgctttcggaaaaagtgaagatgtatggcttttcaatggtggaaaaagtacggtagaaagctattcagatttctctttggaagaacttgaagttcatcttgaatttttccagcggatgaaaaactattatgtcgacgataaaaaccgactgtttattcacgcaggctattcgtccatgcatggtcccgaaaaagaagtgtattccagcaattaccgttgggacagaacattgtgggaaacagccgttgcaatggataaaactttggtaaaagactccgaattttatccgaaaaggctgcttttataccatgaaattttcatcggtcatacacccacactgcatttgggtagtaaagaacccatcaacaaagcgaatgtatggaatatagatacaggagccgcattcaccggagcattaacaatcatggatgtcgattccaaagaattctggcagagcgatccccttccggagctttacccgaatgaaaagggcagaaataactatactgttaaacctaaaaaccgctaaatatcttctctaaattgggaagatattttttttgatacttaaaatcagcgccatcagcaaaatcggcaggagctaaatacacattgatcatgtcattaagaatataaaccgcatttttacgagcgtagttcagaaggagagtgaaaaagcttattcagagatagatcctttcttcaagagatttagcaaagtgaatgacaattctggaaagcaacatctttgccgagtaaaacgcctttgcgaacgaagaatattttcaattttttttaataaaatctttgcggtctccgcgttaaaaataataggtttcacaaactttaagtaattttaaagcccaaaataccactcaatgaaactgaaatatcttttcctgttgcttacttcttcatttctttttgcccagactcaatttcagaccccttttgaaaaaggaaatggaaatcagaccgtaacttatgatgaaatgaacagctattatcagaatttagctaaaaatttcaacaccattcagtaccttaaaaaaggagaagatgacaacggaaaagcaatttatgtggtcatttacaatccttttcccgaaaaagaccttgataaattaagaaaaaacaaagccgttttgttcatcaataacggaattcatcccggcgaaccggacggaatcgatgcgactatgatgctgatgaaaaatctggcaactcagaaaatcaaaacaccacagaatttcattgtcgcagccatttcagcgtataacgtaagcggaatgctcaatcgcggatcattttccagagccaaccagaatggtccggaacagtatggtttcagaggaaatgccagaaattatgacctgaacagagattttattaaagcagataccaaaaatgccagaagttttcaggaaatttatcagtggctgaaaccggatgtttttattgacaatcacgtaagtaacggagcagattatcaatatacatttacttacatttctacttttaaggaacgtctgggaaatgttttaggcgaatatttttacaataaatatcaggctaaaaatttagaagacttaaaaaaactgggttacgaaagtacgccttacgttaatattcatggggatattcctgaagttggctttgcttcgttcgaagattctccgagatattctacaggatatacttccctgttcaattctttgggaactgttcctgaaacgcatatgctgaaaccatacgacaaaagagtggatgcgacgtacaaatatatgttggtgaatcttcagaatttagatcaggattatcagaaaataaaacaactcagaattgaaaatctaaaacagtaccaagccggaaaacagtacggaatccgctggaaaatagattctgcaaaatatacaacgatggatttcaaaggttttgagggaaaatacaaacccagtgaaatttccggaaaaccgagactttattacgacagaagcaaacccttcacgaaaaacatcaggctgtttacaaccgcagttactacaggttatatcaccattccgaaatattatatcattccacagtcgcaataccgtgttattgaggaatttaaaagaaataaaattcagatgaagccgattcagaaagatagcacgattgcggtggaatcttacagaatcaatgattttaaaaccgtgaaaaatccttacgaaggtcattatctccattttgaaacaaccgtagataaagcgaataaaaagataactttttcagcaggggattacatggttccgaccgatcaggaaggagtaaaatacatcattgaaacccttgaaccggaagcattggattcctttttcaactggaatttcttcgacgggattttagcccagaaagaatactattctgcttacattttcgaggataccgccgcagaattactgaaaaaagataaagatttaaaacagaaattcgaagccagaaaagcagccgacaaaaaatttgccgacgacggaaccgctcagctcgactggatctatagaaattctccctactttgaagaaaagacattcagacaatatcctgtttacagaatcttataaattttaaaatttgatttaatttattgataatcactgtttaatttccgtttttttcacatatggaactgttgtttttactgatagaatttaatttttatcagacgaaatttgctttactaaaaccaataaaaccaacacttatggcaactaaaaagcaatttttcgtttcactggaaggcgtagaccttaccgacgaacagctaaaaaacatcgacagaggaattcagaatgtagtgctttccgaactgtccaaagtagacaacactcaggctttcggagcgcacagaaatttcagagaactgactaaacccttaaaagtgaaagactggtttccctggggaatcattattttcaagccgggaatcgatcttaccaagcaggttacagaaatccataatcagataaaagcttatggaggctagttttaactcttcaaaaaagatgtgtcccagctacgttggaaaagttggggcgcagcttttcggagtagtcaataaaggcggaaaagtacagtttataacccctcttaccgtcacagaagattttattgaacagaatgaaaatctggaacagcgattccgtttcaccggaaaatgtgtggaaaaaggatgcggacagtggaataacgaagaatcccgatgctctctgtctaaaaaagtacaggatctgaattttccaaaaaatacagaacttagcttttgtccgatccgttcgcagtgcagatggttttctcaggatggcaaagaagcctgtttttcctgcaatgaagtcacccgcaatatggaagaattgcttgttaataattcagcacaataaaaaaacaacagtaaaattggcggcatatactttgaatagttgataattaagattttatctgaacatcaattttcaaacttactatgaggaaacttctaatcgcaggtatcgccggaatttcagcatttgttgctgtggtatttctttcgggatacggatatatttttaaagctttagccattaatttaaaaaaaggaccttttactccctcaatagacgatgaggaaaaatttccttcacgggttattcgcaacagacatccgaaacgatggaagaaacacatcagttacaataaaaaggaattttctgaaagagttttggacgagctgaaaaagacaagggcatcatctcttctgataattcacgacggaaaacttcttcacgaagaatactggaaagatcatgatgcttcttctttaatgaattccttttcaatggcgaaaggcgttctttcaatcttaacgggttgcgcgattgatgatggatatattgaatctgaaaaccagttgatttccaccgtttttccacaataccaaaacagccgtttcggaaaacatctcacctttaagcatttaatgacgatgcaggcgggattggattgggaagaagaataccatcatccttttgcagaaaattccagacagtattttgtagacgatcttgcggagcaggctttcggaattgggttcaaggaaatgccgggcgaaaagtatgaatatcaaagtgttgctgcgcaattattaggacttgccttaagagaagcaacgggaaaagatcttgcagtttatctttcagaaaaaatatggcagcctttaggaatggaattatctgcaaaatggagcatcgacgaaaaaggcgttgaaaaagcgttctgctgcattcatgccgtagcaagagattttgcaaaactcggacaattcattatgcagaaaggagagtgggaaggaaaacagctcatcagcaaagaatattgtgaaaaacttttatcgcccactaaagaaaacgatgcgttctgctttactatttgggcagatgatgaaagtgatcatcaatacagatttttttacggctttttagggcagttcattatcatggttcccgaaaaaaagatggtgatcgtgaaaaccggattttacaacaggctggatgtcgataaaaagaaaagaccgcttcaggtaaagcttttggtagaagaacttacaaaactgatataaaaaattaagctgcagaatttctgcagctcatttttttgatagtaaatttagaatgaatctctgtaatttagattccctgttgctccctgcggaagaaaaacaacttttcttttaatgctttttgctttttccagagctttaagagccttttgacgttcaacttccctgttgaagtgagagttgatgttctcagattgtgcagttgctttcatatatgtatatttttggtgtgttacagtgagctaatctaaaaatatgccgtttttagggtaaatcttctaatgaggtatcaaaaacaaaaaaaatattttttttcagttctttcttattcttggcatagtagttgaatacctaattgcaactattaaaaaataaacaaataagggatcttaaatatttcccggagcaattcgggaatattttttatcactaattacaggaaaaacaccaatcactataaatattaatacttttgactaaatctccgaatctttcggggattttttcatgtggttttatttgatacctttacagaaaaatagttcatggcttatataattaaaacaacatcagacggtttgatctatgtgaaagcgtcgaacgttatccacgtaaaaaagccaaatgcactggaaggagcaaaggttatgggacagccattggttattaatgtgaatcatattggctttttgagctacaatatcgaaggtcatgttacattctttatggcaagcgggtttgagatctcaatgaagatattttacgaagaagcggaggaagctttcaactgtgcaaaaggaagtatcgaaaagatcatcaggtaaattttaatcaataaaaaagacgtttcagccgaaacgtctttctttttttatcttggtaagcctcttttcagagcaatttctgctctttttacagcgactttttctttccagtccatgtatttcttcttgaagttcttcttcatgatatcatcaaatttacgctgcaccgtaagattccataaagaatgcgctttcaccgcccaggatttgtcccatgctctcagggaaatagaaaaacttccgtccagatatttcatccagtgccaccatccagttggcataaacaatgtgtctccgtgctcaagataacattcaataccttctacgccgtctaaggcagggaattttgtaaagtcaggattttcaatgtcataatcttccagcgcatacgttgcgtaaggaatctggtacagtctttctttccatttgtaatcgaaaagaagaatatgttttcttccgttgaagtgcgtgtggaaaatatgagccatatcgatatcaaaatgcaggaacgttacagaacctttacctccaaaaaacatattgggatatttgtccagaaatccgcccatgagttctttcggagaaatataatcttccagaagttttggggcaaattttatcgggtcaaaaagaaaaattctaagatcggtaggctctctttggataagatcgatataatccccgaatttcattttggctgcagaagcgttaatgggagctgcaggatctgccttcgagctgtcgtacaacggaacttccacatcacctactacttccttcatgtactccatggtccacttctggtacgctggccattttcttgccatgttcttaatgacaacaggttttctcggcttcagatacttttcaatgaattcttcctgagtaatatcatctacaatatctataggctttaaattgattcccatcttcttaaaaatttaatgttacaaaattattaaataaaaatatatgttaacagatttaagctttttttaatctatgattcaaatcatttttaactatttagactaaataaaaaactgaaaaataatcttaaaggcaaaaaaaacaccctgcaaaaaagaattgcagggtaaaaacacaatttgatgaataaaaattcatttcttcccgctaaaataaaaaattatttataactgatttttatctgtaagtgaatattataagctaaaaggatagaattttttctataccattctataaaatactgttgatggtatttaaatttaaaacacaaaataaattttgatgaattttattaattttcaaataaaaaatattttttttcctacccaataaatacggcgtaatttgctgattttcttatgcaataactttacaggattattcataattttataatatgacacaaatgagaaattcgcgaaacattttgcggtgccctatcgtaagatatatttctttaaagtcatcatgatgcatcatccgaactgtacatttattctaggcaaaattgtatagttagggaaaaattaattattaacgattctaaaagaaaacaaattttatgaaaaagaaaattttattcagcgccatgatgggtatttctgtaatggcattggcaaaaacaatacaagcgacatggacttcaacttgtggagttaagcacattacaacatttactggagattggagccaatctgagatggctttatggattgcagaaaaaaatgcagacgaatgtggtaattatccttcaagtgtaacttttaatccttaaattaaggtctgtttcaaatatcactgtttgagacagacttttcaaattattagcgatgaaatcaaaaaaaatatttcttttacttgccatcttttttagttttttttctttttcacaaaaaatttcttttgttccttctatcagagttacatatgactccactttaaacttaggagaaaattttaaaaaagaacaaaaatttgttttgataggaaattcacaggattattattttggagcaaatcaaaattatttaaatgatacaggacaatacgaaagtaaaggagttgatctaagagcaattagcgattattttcaagaaagagttattatgcaaaatggaataatcaatacttttttaacggttaccgaaaataaaataagatatcaggaaacattaaaattacaatgggtactttattctgacactaaaataataaacggagtcaaatgccaaatggcagcaacaaataaattcggaagacgatggattgcttacttttctaaagaatattctcagtctttaggtccgtataaatttaatggattgccaggtttaatttttgaattgtatgatagccgggatgattatcattttacagcatctaaagtagagaagtttgatgatgaatttagttttaatataggagcatttaaaagatataacaaacaagattacttaaaagcatcttttaatctcaggtttacttcagcttctttgcctgttttacagggagaaatgagaaaagaatttgatgatatgatgaaaagaaaacaaaaaagatttaacaatcctctggaattaaaaccttttgaataatattttacttccctgcgaaataataaagcaaaagagccttaaaactaaggctcaaaacacaaacgtcagataaaaaacccacttattttttcagacttttaatcagttcttcaagctgagaactgattacttttgctgcttcagaatctgtaatattgatgataattccctgctgaaaatctttttgaccaattgaattatcgtgcatttcaaaattttcttgcgaatttgaaactgttgatttttgaccatcttcaaaaaggtcttgaattttcacctgaaaaatttcggcaagtttcggaatatattgagacttaatatcggtgatttcattttcccagttggtatatgtatttctgtctaatcccaacatatcggcaatttcctgttgagaaaattttgtcttgcttctcagccttttaagattagttcctactcccatagatgaaattgttttttacaaatgtatacaattagccaaagaattaataataaaaaacctcaaaaagtcagttctttcgtgaaatatggcttaataacaaaatccaaagaaaatttttcattcgggaaaaatttttcctttaaaaaataaagttcctgacattaaaaaatatcactatgtttgtagtgataaaaaagaggtttaacttttgggcttaaatacaatctttatactcgtgtaacaaaacgctttaaccattaactaattaagcaaataataaattatgaaaaagagaatatctttattcctgatgatttttttctctgtaatcgcttttgcacagaaaacggtttcggggaagatcacggatgaagacggggttggaatcccaagtgcaagtgtaacggtggaagagccgggaaaagatgccattcttgcctatggaattaccaactcgaaaggagaatacaaagtcaccttcacttcaggagaatccaatgtagaccttaaagtaaaggcttttaaccagagacctttaacgaagcagatcagcaacagcgatcagacgctcaacttcaaaatggattctgaggctacggaaattaaggaagtgaagcttaaaacaaaaatggttacggcaagaggagacaccatttcctacgatcttaaagcgttcgacagcaagagcgacaggacattagccgatgttttgaaaaaaatgccgggaattgaagtcaatacagatggaaccattctttatcagggaaatgcgatcaataaattctacgtcaacggaaaagacttaatggaaggaggatatggaaccatcaacaactcacttccgaaagatgcagtacagaaagttgaggtactggaaaatcaccaacccgtaaaaatcttacaggataaagtgccttccgatcaggcagccatcaatatcaagctgaaaaattctgttaccatgacgggaagaggagaagtaggagtaggaggaagtccgcttttatggaatgtaaaacttacaccgatgttcttcgggcagaaaagtcagtgggtggttaactacaaatccaacaacaccggagaacaggtagaaaacgaagggaatattctgtctttcggaaacagatttgaaggaagaagaatcaacgcaacccaaaacgactggctaaatgtagaaaatgcaagcaccccgaatcttcctgtaaaaagatatctgatgaacagcgttcactacgtatctgcaaattacctgaccaatatcgacaagaaaaaagaatgggaactgaaagccaacgccaattatacgaataatgcggtggaaagagaatcttataatgagcaggagttatttgcaacgcctaacagacaggcatctactatattgcagaatatccgcaataatttttatacagacaaagcaaaaggagaattaatctttaccaaaaatgcaaaaaagggattctttaaaaataccacaagtttttctcagtactggaacgccgacagaggaattgttgacagaactgtaaaaggttctgcaagcagttatacggcacatggagatgaagcggtggaatcgccaacaacctctttccaaaactcattgagtactattgttccctggaaagaaaaaatggtaaatgtattatcgtacatcagttatcagacagacagacagactttggatgtttcaccggcttcctatctcgcaattcctggctttcttaccacttctacagattttgtgagacagaatttaagacttaaaacttttgaagccaatcattctgccaatattggtttttctacaaaaggatggacgtttactccggaagttggatttaattttaaatcgaccgatttagtttctggtttgtcaaatattataacaaatccttttaccagtccagatcctacacccgcttcacagtacagtaatgatttgaaatatactacagcgacaccttatggaagtttaggggtgaattataaaagtgattcatggatgttgtatgctaatttcccggtaaactcaaataatattaaagcagatgatccgataagactggtttccaaagaagtaaataaagtgacatttgagccaagtatttttgcgcaatatacctttgcctctttctggaaagcttccgtaaatgctaatgttaataataattttggagaaatcaacactgcctattcaggatttttaatgacttctccggctggaatcagtgcgatggatattaataatccgattcctcagaataataataaatctgccggaacgagaatagaatacagaaatccgttaaataatttattctttaacatcaactacagattttctgatgcaaagagaaacttaatttccaatcctacaatcaacgaagcaggatatactatcatgcagtataaagagcaggacaaccatgttttaaataatggatataatgtagaagtaggaaaatatttcccgaaattcaaaacaaatgcttccgtcagctacagcaataatacagcaaaatctgatgcttttctggataatgctgcgtacaccaacaagaacaacagccagtcatttggcatgaaatttaacaatacctatttcagttggatgagcattgattataatgcaagtttctcaagaacaaagcagacaagtacaggaagggtggtttctgatgctgcaagaaaaggattcacccataatttaggacttttcttctatccgatagaaaaccataccatcggcttcaactgggatcaggtgaacaccaatgcagtagatcagaaataccacaacggattctacgatctttcttatcagttcacatgggctaaaaagaaaattgattttgaattgaaatggatgaatattgcaaataagagagtatttgaaacgtatgaaattaatgcaacaaatacaaactacacaagaattcagcttcgtccgagtcaggtcatgtttaccgtaaaattcaactttaaataaaatcaaaaccagtcttcaaaggctggttttttatttgagaaaagaaaattcagaaacaaattaaaaaaaatatgtaacaaaaatcctaaactgataactaattgtataaacattctatttaaaatgaaaaagctattttcaatatttctggttgcattttttactttcgtaagtgcacaggataaagattctaaagaaactgccaaccgttttttttatgaacttactttcaagccgaaaagcgattctgcaaaactggaaaaagtaatgacggttttagacatcgtgaaagacagatccgtttacagagattacaccatgcttgctcaggattctatcatgaaagttcagattgaagcaatgcagaagtcgggagtattcaaagatatgtcgaaatctatcaggatgccgaaattctcagaaaaagtggttaaaacatatcctgatatgaaaatccaatatattgaaagaatagcaagcggattttcaccaatgggaattgcctacacagaaactccgaaattcgactggaaaatttctaacgaaaaagaaaaaataggagcttacaatgctcagaaagctacggctgaattcggaggaagaaaatggacagcatggtttaccacagaactgccttttcaggatggtccgtataagttttcaggacttccgggcttgatcgttaaaatagaagacgatgcaaaaaactattcttgggtgcttcagggaaacagaaaggtacagaactgggaagaactttcttatgcagaaaaaatttccaacatgagcttaaaagtaacagaaatgccgcgggaaaaattcgagaaaacgtttaacgagttcaagaaagatcctttcgctacggcaagaccgatgatgacgcaggagattatgtctaaaacaattccgggaatggacggaacaataggggatatgatgaaaaagcaggagaaaatgtataaagatttcttcaacgcaaacaacaacccgatcgaacttacccagtctgcttctacagacaaaaagaaaaagtaacattcatatttactaaattatatttgaatcaacccaaatgcgtgaaagcatttgggttgatttttttcatgatatacgttatttagattaaatttaaatagcgtatatttgcaggtacaaaaatatcggctttgaaacataaggatttacataagttgagcggatttcccaaaaacagactggggaaaatagtaggatatgataacgacagcctgaaaatgcccaacaagatcatcgaaatggggcttcttccggaaactttcttcaggattttgtatcaggcgccgttcagtggtccgatgtatgtggaatttggtgatgaaaaaagccgtattgctcttcgtgaagaagaaggagattatatcatcgttgaagaattgaattaatgcagagcgctcacaaaaaacagatccttttagtcgggaatccaaacgttggaaaatctacggttttcaatgccctaagcaataaaaagcaaaagaccggaaattacgcgggagttaccgtagcaagccattccggaacatacagttataagaacgaagaagttgaaattattgatttgccgggttcttacagcatttatccaagttcggaagatgaggcgattttttccaaatttcttattgatgaacagcaaaattatgccggagttatctatattctcgaagcgttaagcttaaaaaggggactgcttttgtttcagcagattcaggatttgggaattccgatgattttggtcgttaatcagattgatcaggcagaaagaagaggaattacgatcaatatcaataaattatctgagtctttagggataaaagtttttcagaccaatgccaaagaacagatcgggattgaagaagtaaaagaagctgttcatcataatcaatttgtaacaaccgagaaaatttctttcgaaaccccttccgaacacaaagatttcataagaaaattatcccttcacaaaggatttgaaaacgaatataaagcatggatgagcctttctctgggaacagatctggagaagctggaatctattgtaggactcatcaacgagccggactcaaaaagtctggttccgaaaagactgcaggtgcaggaaacggtaagaagatatcagcatgcagataaaattctgtctgatgttatttctaaaaaaccgcagttcaaagaacttttaacagaaaaattagacaaagttctggttcataaattctggggatacgtcgttttccttttgattttattaattattttccaaagtgtatttttcttagccgaatatccgatgaactggatcgacagtttcttctcctggttaaccgctttcacctcagaacatttaccggaaggacccatcaattcattgatttctaacggaattatcccgggaatcggtggaattgtagtctttgcaccacaaatcggaattttactgtatttcctttatcttttggaagattcaggatatatggcaagagttgttttcctgatggaccgtattttaagaccttttgggttgaatggtaaaagtattgttcctttagtttccggaacagcgtgtgcaattcctgcagttatctcaacgagaaatatcgaaaatttaaaagaaaggctgcttaccattttagtaacaccttttatgacgtgttctgcgagacttccggtgtacagcatcattatcgggcttattatttcagacggaacgtttttaggaataaaatacaaagctttggttttaatgggaatgtatttacttggatttttagtcgcattattttccgcagccattctcaaaagattcattaaaaataaagggaaaacctatcttgtgatggatttaccgacatacaaaaaaccgctctttgcctacgattttaaaatggttttaggcaaagtatgggaattcattactggagccggaaagattatcttcattgtaagcatcatcatctggtttttaagctatttcggtccaaaacagaagccggatcagtttgtggcaaccaatgtggaacttgatcattcctaccttgccaaaatgggaaaaggaattgagccggtaattgctcctttaggctacgactggaaaatgggcgtcggaattctgacaagtttcgtggcaagagaagtgtttgtaggaactatgtctaccttgtacagtcttgaagatgatgctcccgaagtaaaagtaatcgataaaatgagacgcgatgtaaaaccgaacggtgagaaagtattcagctttgcaaccggagtttccgtcctcttattttacgcatttgcaatgcagtgtgtttctacacttgcagtagtctacagagaaaccaaaagctggaaatggactggcttacaggtggcaatgatgaccggtttggcatattttgtgtcgatgatagcctatcagattttaaaataatggatacttccttacttttacaatatattattgtcttactgatcgttgcattcgcgtgctactctttattcagaatattgaaaaagaattttgcaccgaaaaagttcagttccaaaagaaacggatgcgataaagattgcgggtgttcataaaaataatgttttagtgaaaaactgaagaaaaattgtctttattttctctatttttgtaaaaagactatagatgaaattagaaacagtagagtcgctaactaattcttttgaagatttttcacataaaacagaagaagacatagagttttggcttgcaagagacttacagcaattattaggatattctgaatggagaaacttctataacgttattattaaggctaaaacatcatgtgaagtaagtgataatagtgtttcagaccattttgttgacgtcaacaaaatggttacactaggttctggatctcaaagaaaaattgaagatataatgctaacgagatatgcgtgttatttaatcgctcaaaatggagatcctcaaaaagaacctattgcttttgctcaaagttattttgcaattcaaacaagaaaatttgaagaaattcaaaaaagaataaaagaatgtgaaagacttcaggcaagacaaaaattcagtttgtctgaaaaagaactttcaggtcttatctatgaaaaaacaggaaatgataaagattttggaataattagaagtaagggagattttgctctatttggtaaaactactcagcaaatgaaagatatccttaatatccctaaaaatcgtccactcgcagattttctaccaacaattacatttaaagcaaaggattttgcaactgaaattacaatctttaatacaaaagagaaggacctaaaaacagagagtacaatttcttccgaacatgtaacaaataataaatcagttcgtaaaattctattgcaacgaggtattgttccagagaacttacctcctgaagaagatattaagaagttggaaagaagagtaaattcggaaagtaagaaaatagaaaagaatcctaagaaattaaaataatatatgtcactaataaaaagcatttcaggaatccgtggaaccattggcggaaaagtaaacgataatttaacgccgcttgatgtggtaaaattcgcttccgcattcggaacctggcttcagaacaataaaaataaaaaagatttaaccttggttatcggaagagatgcaagaatctccggacaaatggtgtcttctctggtaacggcaactttacagggactcggaattaacgtagtagatttaggtctttccacaacacccaccgttgaaattatggttcccgaactggaagcagacggaggaattattctcactgcttctcacaatccaaaacaatggaatgctctgaaattattaaatgataaaggagaattcatcagtggagaaaacggagctgaggttttggctttggcagaaagcgaagatttcaactatgcagaagtagacgatttaggaaaatatgagacaagagaagatgcttttgatattcatattcagcagattttagacttgccgatggttgacgcagaagccattaaagctaaaaattttaaagtagttttggatgcggttaattctacgggaggaattgcaattcctatgcttttggataaattaggatgtgaaacggtaaaattatactgcgaaccgaccggtcattttccccacaatccggaaccgttaaaagaacatttgggagacatttgtgagttggtaaaaaaagaaggcgcagatttcggaatcgttgttgatccggatgtagacagattagctttaatcgatgaaaaaggcgaaatgtttggcgaagaatatacattggtggccgttgcagattatttgctgaaaaataaaaacggagcggcaatttccaacctttcatcaagccgtgctttaagagatgtagcaaacacccacaattccgaatattttgccagtgcagtaggagaggtgaatgtggtcactttaatgaaagaaaaaaatgcagtgattggaggagaaggaaacggaggaattatttatccggatcttcactacggaagagactctttggtaggagttgctttatttttaacccatttggcaaaagaaaataaaaccgtttctgaactgagagcaggttatccaagttatttcatgggcaaaaagaaaatcgaattaacgccggaaatcaatgtagatgatattttatccaaaatggaaaaagaatatcaggacgaagaagtttctacagtagacggtgtgaaaatcgactttgaaaacaactgggttcacctcagaaaatcaaatacagagccgatcatcagaatttatacagaggcaaaatctcaggaagaagccgataaattgggagacgatatcatcgcaaaaattaaaagtttaatttaatctgaaataatagcggagctttttagctccgtttttttgtttaaaaatcgaaaacttcaaaattattgacgatttgaatcttcgcaaaaagcgttcatcattatgttaaattaacaataactcctccttttttatccacaattctttgatgataatgatcttttcactatctttcagatagaaatttacgaaaataaatgtcaaaaaaatttcgcaactttgcatacattttgaatcataaatttcagaagtaatattaatttaaaaaagtttgtcgaggtttgtaagtagattcagacattggctgacgaaggatgtgagtattggaagagtattttggaaatgaacttgtgaagaagttcgaagaaatgatggaaaataatgatgaattctactttgatacagaagaattggaagacatcattgtttactacctggagctgggagactttaattacgccgatatggcggtgaattatggtttgaagcttcatcccaattctttggacattaagattaaaaaacttgaagttcttttagaatgggaagattataatgcggcgaaagatcttatcgatgagctgaaaggttcttcaatggaaaacacagactttttggtatgctacgcaaagtattattcgaatttaggaaatcctaaaaaatccatagaaatttgtaaaaaagcactggagctgaaggaagaagagaatttccttcacaactttattgcagacgaatatgttaatttaggagacccttttaacgctcttaaacactacagaaaagcactgaaagaagatcctacggatgaatattcgctggaaaactgtatggtgtgctttgcagatcttaataagagtgaggaggctatagcctttctgaatgaatatctggatgaatttgcctattctgaagtagcgtggttcgagtacggacagttctatttcaacaggaaaaactacgaagaagcaataaaaggatacgattatttattggcgatcaattccagttctgtaggagtttatgccaataaagcggcttgttatgaagctttaggacagtataaaaaagcaatcgaagtctatgaagaaatgctggaactggaatataccaaagcgtttaccttctataaaattgggctgtgttataaagctctgaagcagcctatcgttgccttaaactttttccagaaatccttaagagaagatccgcagttctatctttctatgatggagcagtcgtatctttacgaagagatgggcggaatgacggaagcattgcattttgcaagagaagctacgtatcttaacgaaaataaccttgattatcagaaaagattagcatttctgttcattgattcaggtaagttcgaggaaagcctttcatgccttaaaaagctggtggatgtagaaccttcaagattctacaactggtatgcttactcggaagttttaatgcttttgggagaatatgaagaagcgattatcgttttaaaagaagctttaaaatcgcataacagagccgaattgtattatcagctcagcaactgttatttcaaccttaaagatcaggaaaaaggcgttgaatctcttcagaatgcactggagcttgatccttctttagtaacggatatgcagaaaaaatatcccttcattaaagatgaggttaaaaaagcgaaggcaaaagttaaaaagaaaaattagtcatttgattttccaatgacacaataaaaatcctgcagaaacgcaggatttattttttgaggcataatactgaaaaatagttggtagaatcctatcaaaacctcattgttaggctgtttgtaggaagttttatgaaacgtgtttcataaaactttttctttgtctgaaaaatggcaaaaaaacgtnnnnnnnnnnnnnnnnnnnnnnnnnnnnnnnnnnnnnnnnnnnnnnnnnnnnnnnnnnnnnnnnnnnnnnnnnnnnnnnnnnnnnnnnnnnnnnnnnnnntctctgccatatgcgcctattgtttttacccggaaaaaccatcggtaaatttcccgaactggataaatgcatagatgccaaggacaactaaatataattcaatattttagcgtcgagttcacgttattataccagtctaaggctatattaagtctcttcagtaaagtaagatctaccccgatgttcgtctgctgcatagattcccacttcaggtttttgttagaaagattacctacaaggttgtaaatagtaagcagggaagtatatctgttattcggaatattctggtttcctgtttctccgtaaccaccacggaatctgatgttactgatgatgtttgaaggaatccattccatgaatttttcttttgttactctccaagaagcagaaactgccggaaaatatcccaactgttttttgccgttatccgcttcaggatcaaacttcgaagaacggtctgctcttatggaagcagtaaggctgtatcttccgtcgaaatcataaataattcttccgaaaagtgaagaaagagaattgcttccttggaatgaagttgttgtaacatcgtccgcaagatttaatccgtaaacatcgttcgatttaaatccctgtcctatggagctgaatcctttataatgaacatcctgtgcttcctgtccggcaagtattgtaaatttattctttcctaaagaaaaatcatacgttaataaatttttaaagtttacagaataccagtcctgatttctcacatacaaatctgcgatcagattaaattgagaacccctgtcataagaaggatgaaattctgtgttttcagaaaattccgtattcgcagaaagttccattctgtatttcagtcctttcgtaattttagcttcagcatacagatttccaaggaaatttttacggattaatttattcgtattggtaagagcttcggcaacaggattgaaataattaacattttgtcctgcaggaggagaagcgtagcttccgtcaaaattataaatcggcatatccggagcctgtaaaagcgtattggagataagcccgttataactttggtttactgtaaagttttcattgcttaccccgcctgtaatattcgtgcccactttcagccagttatttacctgagaatctacattcgtacggaatgtatatcttttaagtccggtattgataatattaccttcctggttaagatagttcgcggaaatataaaatgtggtattatctttaccgccggaaaatgaaagctgatggctttgagaaaaagcagtcttgtaaatcgctttttgccagtttgtcccattacccagcaattcaggatgggcaaactcaggtcttggctgaagattaaacagctcagacaattgattctgatatcttgcgtactgctgaagattcatcacgtccagatatttataaatactggaaaccgatgtatacccttcataacttatctttcccgctccttttttgcccgatttcgtagtaatgataataacaccgtttgctcctctcgaaccatagattgccgttgcagaagcatctttaagtacatctattgattctatatcattagggttaagaaaggtaagcggagaaactgcggcgtttcctgaacctcccgtagcagaagtatcgttacctgcaatcggtcttcccgtagtagaactgttggttgcatctccggaaatgggaaccccatcaataatatacaatggttcgttactggaactgatggaagtcgttccgcgcactcgtacagaagcagccgctcccggctgtccgttaccgttcgttacggaaactcccgcaacttttccctgaagcatctggtctacggaaacctgtttcagatcctgaatatccttagatttaatagaagatacggcagagtttatatccgtttttttctgagcgccataacctatcattacaacttcatcaatttttgtctcttttagagtatcgctctttgttttttgagcatgcacccaacttacaggaagaaaggctaatgcaaaaaataaggcggctttattctgtagaaccgggcttagtaagggggtgtttatttttctcataattgctacggaaaagaaattaatgtttagtttgaattaacattttgttcacattgatgacaaagctaaattttgaagctaattgcgattaatgttattttgtcataattcagtattattttacctgttgttatactaaatgccctgtttgtttattttaattaattgattttcagatttttattttgtttttaataaacatgatgttatggttgtttatagtcatatttaggtgttttttctacattatctgaaaaataaattagaattatatgtctaaaatggtctttttcgtaattaagatttaataaaatattaacagaaaacatcaccaacctcttaaaaaaagaacaaatcaatgattttatcgaattattgaactcttttaataccgttaaactgatttttaaattccgaaggtgtacatttttttatagatttaaaaattttattgaagttggcaatattgttaaagcccgactcaaaggcaacttcagataccgttagttttttttcaatcagccatcttgcggcgtaacccactcttacttcgttcaggtaattgatgaatgtttttcctgttctcttctttataaacctgttgaaggttacaatactcatattagaaatagcagcaacttcctcgagggttattttcttgtcgaaatttttatgcacataatcgtagacaagcttcatgctgtcgtcatcggtaaaagtttccagttctatactgtaagatgagagaatggttgtattctctgcgatagcaagttcatgcaggatgtgcatcatttccataaaagcttcaaaaccttttagtttagataaattcagaaaattatcttttaacttttcggcggtttctgtagaaaaaagaattccccggatagaatttttaataagatcgtcaatgggtttcataattcgtcttttcattaaagattcatcaaagaaatcctgattaaactgtaccgttatttcatggatttttttcgatttgcacctgtaattatcccagtaatgaggaaggtagggaccaatcatcaccagttcgatatgatctatttctccaatatggtcgccaacaattcttttattgccttttcccttaagaataaagttgatctcaatttccgggtgataatggagaggaaaatcgaacgtgttttttatgcggtcgaacaccaaaaaggtttcatcgggtgaaatagtagctatttctctaagaatttcggagtgtttgctcattttgtatcttttgtatgagtgttgattttcagttttttaccgtttatttgcgtaatttatatgtaaaaatgacaaaataatattacatcccgccaagatacataaataaatttggcattaagcaaatgttaacagactgatgcattttctttactatgaaattacaatacaaaataccattgatcttacttttgtgtgtgttggggaaactgaatgcccaaaaattcgtcaccgtaaaagaaggtcatttcatccttaaaaaaaaggaatattattttgtaggaaccaacttttggtatgcttcttatcttgggttggaaaaaaatgaagaaaagggtatcggcagattaaaaaaagaactggattttttaaaatctcaaaatattgaaaatattcgtgttcttgccgcagtggaaggttccggaaaattaaacggagcaaatagagtagaacccgcatatcaatatgaagccggaaaatttgatgaagacaaattaaaaggactcgacattcttatggatgaagcaggaaaaagaaacatgaaagtaatcctttttctttccaataactgggaatggagcggcggatggctgcaatatttactttggaacaataaaattgataaaaataaaactgccgaaaaactgaactgggatgatcagagagactttaccgcaaagttttatagctgcgaagaatgtaaaaatcagtattttgaacaggtcaaaaaaattgttacaagaagaaactctgtgaatggaaaaaaatatacaaaagataaaacactaatggcttgggaaattgccaatgaaccccgcccgatgagacccgcagctaacggagagtataaaaaatttattacagaaagtgcttcgtacattaaatcgctggataaaaatcatctggtaactaccggaagtgaaggagtacagggaacggaagatatggatctgtataaagaaaaccatgcagataaaaacatagattatcttaccattcatatttggccgaaaaactggggctggtttgcaaatgagaccatggaaaaagatttcgaagaagtgaaccataaaacctcagactatataaaatctcatctcaaaattgcagacgaactccgcaaaccgctggttcttgaagaattcgggtttccgagagacggacattctttcaatatcagcagcagtacaaacttaagagacaaatactacgaaagtgttctgaaattatggaatgagaacagaaatctgaaaggaagttttgccggatgctctttctgggcgttcaacggaattgcaaaaccaatttccgggcagaccttctggaaaaaaggcgatgattacatgggagatccaccgatggaagaacagggactgaatggagttttcatctcagatcaatccacatggaacatcataagaaaatacaatactaatccttaaaagataattaaaatagcaggataaatttcctctacaattaaataaatgaattccttaaaaaattttattatagtttctaacgtattctgtgccggtctttttgcggcgcaggatacttcttcactgtcaaacaaaaatgccacaccggaaacccggaatctgtacaaaaatctttggcagcttatggataaaggaatgatgttcggacatcaggatgatttggggtatggagtaaactggagaatgcaggatggaagaagcgatgtaaaagaaacagcaggagattatcccgcagttttcggatgggacgttatgaatatagaatccggcggaaaaggccctattgatattttcagttttgcccagatgaaaaagatgatggaggatgtctacaacatgggcggaataaataccataagttggcacgccaataatcctttaaccggaaaaacagcctgggataatacaaaaggaggcgtaaaagccattttacccggaggcgaaaaacatcagatgtttctcaactggctggatctgatctcagattatctggcttctgtaaaggggaaagataaaaaacaggttcctatactttggagaccttatcatgaacttacaggaagctggttctggtggggaaaaaataactgtacctctgaagaattcaaacagctttggaaaatgacctacgattatcttaccaaaacaaaaggaagaaataatcttatctggatctacaatacttcagactttaataccaaagaagaatttctggaattttatcccggcgatgaatatgtggatatgattagctttgatatctatgagcttgataatccggtacataatacaggttttgtggaacgttctcaaaagcagtttgccattatggacgaaattgcgaaagaacatcataaaattccggctcttgctgaaacaggatatgagcagattccgtacaaccgtttctggacaaaaactttaacggaagccatcggaaactacaaaatttcttacgttctggcatggagaaatcatggattgacggaagagaaaaaaatgcattattatgtaccttacaaaggacatccgaatgaacaggatttcagagatttttacaatctcggcaacacattgttcctgaaagatatacagaaaacaaatgtgtataaataataaacgatacccatcgtaaattattttaaaatcaattgtaaaatttaatcattaaaagaaaattaatgaataacgaaaagataaatataaaagaaaaagtggcttacggatttggagatgccgcatcctctatgttctggaaaatcttcagcatgtatctgctttttttctataccgatgtgtttggtcttgcggcggcggcggtaggaaccatgtttctggtaaccaaagtatgggattcctttttcgatccttttgtgggaatttattcagacaggatcgatacaaaatggggaaaattccgtccttttttattatgggttgccgttccttttgccattatcggtgtattaaccttttataccccagattttgcacacaacggaaaattgatctatgcatacatcacatattccttaatgatgatggtgtattcactcatcaacgttccttatgcatcattacttggcgtgatgtcttcagacggtaaagaaagaactacactggcttcttacagaatggtttttgcttttgcaggaagtcttattgcgctttggatgatagaacctctggtaaaatattttggagacggaaccttaacttcttcgcaaggctggttttataccattgttgtattcggagtaatgacgacgctgctgttttggggatgttttgcaggaaccaaagaacgtattaaacctataaaaaaagaccagtctaccttaaaagaagatcttaatgatctttggaaaaataaaccatggtggattcttttgggagccggagttgccacattgcttttcaataccattcgagacggcggagcaatttactatttcaaatattatctggaaaaaacagatcatgaaacattttccattttcggtatgggaacagggatgtcctatcttaccatttatctggttttaggacaggcagccaacattgtgggagtggttttggcgacccctttagccaataaattcgggaagaaaaaaacattctttgccgcaatgttatcagcagcagttctcagtatcctgttttatttccttacgaaagataacatcacgatgattttactgctgcaatttttcataagcatttgcgcaggatgcattttccctctattatggtcgatgtatgccgataccgcagattactcggaatggaaacagggaagaagagcaacaggacttgtattctcggcatcatcaatgtcccagaaattgggttgggcatttggtggagcagcaacaggatggcttttggcttactttgggtttcaggcaaacgttgtacagacagaaaatgcacagaccggaatcagattgatgctgagtattcttccggcggcaggagccattatttctatgcttttcatttttgtgtatcctttaacggaagaaaaactttcatcaattacagaagaactggagcagagaagaaaagaaaactaaatacatacaaatcatataaaaacatctgaaaccagatgaaatataatttctattacaaacaaaatataaaataatatagcaagatgagtgatttattcaatacaagatttaatgaagtgtcagaagaatttgaaaagctggttactcaaaaaaattctccggaaaatcatgccggaaacggaatttttacaagatataaaaatcctgtcgttacagcggctcatactccgttagaatggcgttttgatatggatgccgaaagaaatccattttttatggaacgtttcggaatcaatgccgcttttaacgccggtgcaatgaagtggaacgataaatatattctttctgtaagagtagaaggctacgacagaaaatctttctttgcaattgcagaatctccgaatggtattgataatttccgtttctgggaaaaacccgttgtgattcctcagattgaaggaaatcccgatacaaacgtttacgatatgcgtttaatccatcatgaagacggatatatctacggaattttctgtacagaaagaaaagatcccaacgcaccgaaaggagatacttctatggcaattgcaaatgcgggtattgtaagaacaaaaaatttagtagagtgggaaaggcttccggatttaatttccaatacaggacagcagagaaatgtagtattgcatcctgaatttgtaaatggaaaatatgctctttacacacgtccccaggacggatttatcgatgttggagcaggaggaggaatcgggcttggctatgttgcagatatgacgaatcctgtggtggagaatgaagaaatcatctacggaaaaacctatcatacagtttacgagctgaaaaacggtttggggccggctcctattaaaacagacaaaggctggctgcatcttgctcacggagtacgcaacacggctgccggattgcgatatgttttatatctgtttatgacggatctaaacgatcttggaaaagtaatctataaacctgccggatattttatggctcctgaaaatgaggagagagtaggagatgtttctaacgtgttgttttccaacggatggattgccgatgaagatggtaaagttttcatctattatgcatcttcagacaccagaatgcacgtagcggtttcttcagtggaacagttgacagattattgcatgaacacggcagaagacagacttatctcatcagaatcggtaaaaacaattattgagatcgtagataataatctggtttccaaataacagatcatcagtactgtaaaaaaatctcaacaataaagataataagatttaatctcaaaatgcagacagagtttttattgaatacaatgcaaagtgagctccataatattctgaattattggagaaagaatacaattgacgaaaaaaacggaggttttataggtgagattgattttaacgaacaaaaaaatgctgctgcggaaaaaggttccgtaatgtacggaagaattctctggactttttctgcagcattttctgttactcagaatcccgaagatctcaatatggcaaaaagagcttttgaagagattaaaaccaaattttacaatccggagcaaaaaggaatctattggagcattaatgcagatggaacagtaaaagattccaaaaatcagatctatgccatttcatttgttatctatggtcttagtgaattttataaagtttcaaatgataaagaggcgctggatctggcaataacgctctatcacagcattcagaatcattcttttgataaagtgaataaaggctacttcgaagcctacacccaagactggaaagaaattgaagatatgcgtctcagcgaaaaagatgctaacgaaaaaaagaccatgaatacgcatcttcatatcgtagaagcatttgccaacctttatctggtatggaaagatgaagatttgaagcagaatattattcagttgctggaaacgatagaccaatatttcatcaataaagaatcatggcatctcaggctgttttttgatgaaaattggaacgaaaagaaagatgtgatttcctatggacacgatatcgaagcggcatggctgctgcaatggtgtgcagaagctgcagaagacgaaaacctgatcgcgctgtacagaaactatgcagtgaaaatggcggatgcaacatttgaaggactggatgaagacggaggattatggtatgaatatgaaccggaatccgatcatcttatttcagaaaaacactggtggccacaggcggaattgtggattggttttctgaatgcttatcagctaacccagaacaaaaaataccttgatgtttttagaaaaaatgtggaattcacagaaagatacatcattgataaaaaaaacggagaatggatctggggaatcaacgaaaagtatcttcccttagaaaaagataaagcaggattctggaaatgtccctatcataacggaagagcctgtttagaaatcattaaaagagtaaagtaatatatttttaaaacaataaaatgaatacaaaaattatttctcagaaatttaaaattttagggatgatcgcttttggagtctttgccaatgcgcaatccctctatcttacatcggctttaccggtaaacgttactgtaggaagttctccttcctttaccttaaactacacgtctgccacaccgtgtaaaattatagtatccctgataaaatcccagtcagacggagtaactccggattggaatacttggcagacaggaactattttagataatcttcctgctacttcttctcctgtttcaaagacgattacagttacagttcctgcaaaccagacaataagcacagatttaccttcaggaatcaattatctttgggcgcttacccttcaggattcttccggaggatggatagcaggaagccagccgcaaaccaatattatatcatccaataccgttatagataatgtaagcttcaacggagcacttccggcttctgtatcggctggttccacacaaagcataccttacaaatatactgcaactacagaccgtatcgtgaaggtaggactttcaaagtacagctcttccggaaattggatcagtgatgttgtgtcagtaattattaatcctgcatcggctacaacaacaacgcctgtttcaggagttgcaaatcttgcgatacctgcgggaacaacatctaccgctaatctttcaaacggagaatattacggttgggaagccacaatggctactacatcatggagctatatgaacggaaccaacacgaatgtagttgtaacaagtgccaatacgacattatctgtttctgattttgaagcggctaaaaacccaattaaaatctatcctaatcctgtaaagaataccctgtatttcagtaatcctgaaaaaataaaatctgtgaaaattaatgatcttacaggaaaagaaattttcagaagtacgaaagatctggataaaggagttgatttttcagaatttgccaaaggaacctatattattaccttaaacggaacagattctcagaaaatcattaaagagtaagatataaaccttagaagaagaatgcctgaaataaagagaataatttaaaatatccgaagctgtttgatataattttattacctaaaataaatcgatctgtttttaaaatattgataaacttttaactccgaagttaaatgaagatttaatttaaaaacgtctttttagcgtagaaaattaagttgattttgtcttaattaattttctgcatatttaaataattcaaaaaacatctcagataaattattctctttttaacaggtaatgacaggaaggaaaaaactcaggaagtaataaaaataaacattcaaatcacaataatattaactttcaaaaacattttaaaatgaaaattcaaagtaaattttttctgatatctttcttcgtaggaattctttcctgtcagtcttcagaaaacgatcccgttgagaatagcacctctcagccttcagaatccataaataaactcgtgaataatacctcagatgcaagtgctacccaaaagacccagttgttattttataatttaaaaaataatgccggaaccaaaattctcgtaggtcatcaggatgcgttttacacctattatcaggataatacttccatgtctgacgtaaaaaaagctacaggatccgatcctgcacttatcggtttggatctcatgttcattaccgacaaaaattatcaggcgaatgcttccaattggtattatcagcaggagcagaaaattgtggcagcagcaaaagaagcctaccagaaagggatggcggtaacattttgctggcatttgagagaaccttacaacgaaactactttctacacctcggaaatgacggcttctcaaaagcagaacgcttttaaaagtattcttccagggggagccaaccacaactggtatcttaccaaactccagaaagtggcttctgtatttaaaaatcttaaaggaagcggcggcgaagaaattcctgtgatcttcaggccttttcatgaattcgacggagactggttctggtggggagcagcttactgcacggcagacgaatataaacagctttggcagtttactgtaaactatctcagaaacaccatgaatgttcataatgtactgtatgcttttgcaccggatgcttcctacacaacttctgcagcctacctttcgagatatccgggagaccagtacgtagatgttttaggaatggacaattattatgattttacagcacagacaacagcaggagcaaataccgccaacagcaaacttaaagtaatatctgatcttgccatccagaaaaataaaattgcggcattaaccgaaaccggatactccagccagaacagtacagccagaacgtctacccactttacgacactggtgcatcctgccattacatccaataacgtgaaaatttcatatgtttgcttctggagtaatgcgggaaatacatattacgttcccactccggcaacaccttatgccacagattttaaaaactttacccttaaaccgcagatggctcttcagacaaccatagccggaattttatataattaacagaaaaaagaatctgaatgaaaaaaaatattttaagcatttttattttagcttcattagcacttagcggtcagaaaaacctcatcagcaacggaggttttgaaatggatgctcaaagctggaacaatgaaagtgcgataacaattaatccgtacactaaacatacaggaagtaaaggaggcggaattacagaatataccgctccgcagtggaaaggaatcgatcagaccttcagtattcctaaaaatacagcagcgatcgaagtttctgcatggctgaaagcagatggcgtggaaaaaggaaaaagtgactggaacaaagcagtggtaattgccgaaattaacggtaaaggagaaaatattgccgctttggaaggaacaactccatggaaggaatataaaaaagtaattccgctaaataaagaccgttccggaagacttatgattgctttatccgaatgtacaggaagtttctattttgatgatattaaaattacaccgcttacacaggaagatcttaataaaattcaggagcaggaaaccaaaaaatatgaagtgaaagtaattaccgattctactccgctggaaattgtaaccctcagtaatacggactttgaaaacggactcgaaaactggaggggaaccgctgaaaccacctccgaagaaaaagtaaaaggacagaaaagcttaaagctgtcttcttcaaatcctgtctggttcggaatagatcagattgcagatatccccgatggaagcaaaacactggatatttctgcatttgcaaaaacaaaagacctgaaacccggaaaaaacgactggaataaaggagtaatgatcgtagaattcaccaaagacggaactgcaaaaacaggagacgatcagcctgtattttttgtttcggacgccaaagactggcaaaagttttcaaaaacccttgctgttcccgcaggttctagaaaatacagaattatgctggctctttcggaagctacaggaactatgtatgtagatgatattcaggtaaaattcaacaaataaaaatttaaaattaaataaacattagtatggaacatgacgtaagaccttggggagaatattgggtactggatgactcagaaactcataaagtaaaaagaatacaggtgaatcccggtggaagactatctttgcagtatcatcataaaagagcagaagtctggacaattgtttcaggagtcggaaccattaccattgatgaagacatcagagattacacagtagggcaggttgcacagattcctcttggagcacaccacagaatagaaaataaaacttccgagcccgttgtttttgttgaagttcagtacggaacctactttggggaagacgatattgtaagaatcgaagacgattacaacagagcataagaccaaaacaaccacaaataattattgaacacatgcttcaataattataaaggtcaataaaacgtaatcacaaaagaaaagaaacatcttgctgtttttaaattaattacagcagcctaaaagatgatttcgctgtttaatccggatagattttttgcttctggatcttaatatttcttttgtgattacctatacatttcaaaacagcttcaaacacaggatgatcaaaaattaatttttatcattaatctttattttacatttctttactatgaaaatttttcctacaaaatttttctcgttagcttttctttcggctttatcttttgcaaatgcccagttcagactatctgacgagaaagccacacaggaaacacagaatctctatcaaaatctggcaaaagcacagaaaaaaggctatttcataggacatcaggacgatttggcgtatggtgtttactggaaataccaacagggaagaagtgatgttaaagaagtggtaaaagatcatcccgctgtgtatggctgggaacttggagatctggagctgggaaaagcagagaatcttgatggtgtaccattcgctaaaatgaaagaattcataaaagaaggctatcgccgtggcggaattattaccataagttggcactccaacaatcccattacagacggcaatgcatgggatttttccaatacctccataaaaagtattctgaaaggcggagataaacattccgtttttctatcttatcttgataaagttgccgattttttagcggatttaaaagacgataaaggaaccccgattcctattctgtggagaccctttcatgaacacaccggaacatggttctggtggggcgtaaaatctgcttcagacgaagaatataaagagctgtacagattttctttagattatttgaaaaatgaaaaaaaactgcataatcttatctctgtctacaataccagcgtagaatataccacccccgaagaattcctgaaacgttatccgggagacacctatgtagatatgatgtcttttgacgcttatcagagaggttctgtggatgaaggaaaaaagtttgcagaaaaactggatgttcttatttcagcaatgaatcaggcagcagaaaaacataataaaatttcagccatcggcgaaataggatataaccagattccggattctgagtggtttacgaaagtgctgaaacctgtttttgataaacacacattttcatacgtcctgttctggagaaatgcaggtttcaaaccgggaaataatgaagtagaatattatctgcctttcaaaggacatccttcggaaaaagatttttttaaattctataaagataaaaaaacactatttgaaaaagaagcaggaaaaatgaacctgtacaaataataatgcataatccattagtaagataacagttaaaattaaacaggactatttgcagttgaaataattttaacaaacaagttaccagtatcttatgttggataaatttgaaattgtttgaacagaaataacaataaaaaaggtaaaatgaaatcttcacgcattacacttctattcattttaatttccatatttacatttgcaggaaatcctgtaaaagaaatcggaaatcttcagcttgtgggaacccagctttccgatgcaaaaggcaaacctgtgaggttagtgggaaccagtttcggctggagcaattttcatcccagattttataccccgaaaaccgtaaagtggctgaaagacgactggaacgtaaatgtggttcgtgcttccatgggaatagatccggaaggtgcgtatctgcaaaatcctaaggcaaacctcaaaagcatagaaacggtaattgatgctgccattaaagaaggcatctttgtaattatcgattggcacgctcataaaattcatacaaaagaagccagagaattctttaatacaatatccgcaaaatacggaaaatatccgaacgtgatctatgaggttttcaacgagcctgaaaaacaatcctgggaagaagttaaaagttatgcggaagaaattgtaaagaccatcagaaaaaatgatgccgacaatattattctcgtaggctgtccggaatgggatcaaagaatagatctcgttcagaaaaatcccttaaaagacaaaaaaaatatcatgtacaccgtacatttctatgcaggaacccatggaaaatggctgcgcgacagaaccgatgaagccataaaatcgggcattccggttttcatttcagaatctgccggaatggaagctaccggagacggaaaatttaattatcctgaatggcagagctattttagctggatgaataaaaataagcttagctggattacatggtcggtttccgacaaaaaagaaacctgctccatgcttcttcctaccgcttcctccgacggaaactggaaattatccgatcttaacgaatcaggaataagaacaagagaatatcttaaacagtttgacggcagaggaaactatcttcagaaattttactggcacggaagagtgcttcagtcttcttttaacgaaggtaaacttattggtcccggatcttataccgaatttcagtttaccggaaattccgtaagtttcggattaaaaaatattcctttccaaggctattacaactatgtttccattgaactggacggtaaatacatcggcagatttaaaatagacaataacgagattaaaaaatttacttacgatgtttcagacaaaaatctgaaagtacacaccatcaaaatcgtaaaggcaacggaagcggcgatgggagaagtctattttgacggcagcggaatcgatgctgtctcttttcagccgaaacctggaaaaaaaattgaattcataggagattctattacctgcggattcggaaatgatgaaagcggactgccgtgcggaaaaggacagtggtttgatcagcataatgcgtattttgcttatggtcctgttgctgccagaactttgggagcagattatcttttaagttctgtttcaggatatgggatgtatagaaactggaacacagagaaatcggaggaaaatattctgcccgatgtttatccttatctttatctgagaacttcagagcccgaacttttcggaaacgattatcagcctgatctggtaagtatatgtctgggaacaaatgacttgtcgaatggcgatggtaaaaaagaacgtctgccgttcaataaagaaaaattcatcggaaattatatagaatttgttcagaatatctacaaaaaatatccggacaccagagttgttttattaaacagtccgatggtttcaggcgagaataataaacttctcgtagaatgtttaaatgccgtgaaaaattctttcaggaatgataaaaaacatcagccaatcgaaatatttgaatttaagccaatgactccgaaaggatgcggatatcatccaggtaaagaagacgaccagataatggcaaaccagttaattccttttttacagaaatacttaccttaattaagctttaatctatctcacatgaaatctatcataagtcttttctctttattactaacgaatctattgttcgccaacatcaatcttccggcaatatttacagacaatatggtgttgcagcgtaatgcagaaatcgttatttggggaaatgccaatccaaaagaagaaatcaccctgaaagcagattttctcgataaagaatacaaaaccgtgacaggcaatgatgctgttttcaaattcaccatacccacaggaaaagaaggcggaccttacaccattaccctgaaaggctacaacgaagtaaagcttaaaaatgtaatgctgggtgaagtatggctgatttccggacagtctaatatggaatatacaccggcttggggaatgaaagatgctgatgcagaaactgccaaagccaattttccggatataagattttttaccgttccgaaactctcatcatcctatccacagaataatttctttggaagctgggtttcctgcaatcccgagaccatgaaaaacttcagtgcgataggctatttctttgcccaaaaaatacaggaaaacctcaacggtgttccggtaggaattatttcttccgcatggggaggaagtgcagcagaattatgggctccggaacaggtattccatcaaaatccccggttagcagacaattacaaaaaactgggaagttcagaatattatcctacgcagatgagcggagcgtacaatgcaatgattttccctctgaatccgtataaaataaaaggcgcactctggtatcagggtgaaaccaatacaggaaatgccgaaggatatacagatctgctatcttccatgatacaatcctggagacaggcaagaggagaagaatttcctttttacatcattcagattgccaaatatacaggttggggcgatactaccgttaaaattcagaattcccagagaatagtttcagaaaccgttaaaaattcaggtcttgtcattacctcagatctcgacagaacagacgatattcatccgaaaaataaaaagccggtcgggataagaatggcaaatcttattctgaaaaatgtatacggcaaaaatgacggtcttgtagaaagtccgaagcttaaaaacgtagaatacaaaggaaataaagctattttatcttttgattttgcagacggattgcattttaaagataaagaatcaacactttttgaaattgcaggaacagatggaaaattttctccggctgccgcagtgataaaagggaataccattattttagaatccaaagaagtgaaaaatcctgttcatgtaagatatgactggagcaacaccgcggttcctgatttatttaataagtctgaattacccgcttccagtttttcaactgagaaataaaacagaaaaattcatagcgtcagaactttaaatgaaaaattttaaaagcaccagatatttcttttatattgattgaattttaaaaacggacattcataaattgtgattattaattttttaccgttaaaaaatatttgagtttttatctcagaaccttacgttaaaattaaagatcataatcaacaaagaataatcaaaaataaaatgaaaataaccaaaatagtaatcatctccataataagcatcattacagtgaacacagtcagcgcacagcaaaaactcaaccccgaaacagaaaagaagatcgatgttctgatgtctaaaatgacactggaagaaaaagtagggcagatgaatcagtataacggtttctgggatgttacgggacctgctcccgtcggaggaaatgctgaagaaaaatatgaaaatataaaaaaaggactggtaggatctatgcttaccgttcgcggagtaaaagaagtaaaagcagttcagaagatcgctgtggaacagacaagactcggcattccgctaattattggttttgatgttattcacggatacaaaacgatttcgccgattcctttggcagaagcggcaagctgggatctcaaagccatcgaaaaatctgcggaagttgctgcctcagaagctgccgcatccggaatcaactggacattcggtcctatgatggatatttccagagatgcaagatggggaagagtgatggaaggagccggagaagacccttttttaggagggaaaattgcagcagcacgcgtaaaaggttttcagggagataacaccttcagatctccgttaagaattgcggccaccgcaaaacattttgcagcgtacggttttgtagaagccggactggaatataatgccgttgaaatcggaaacaatactttattcaatcaggtgttgccgccttttaaatccgctgtggacgcgggaataagaagtgtgatgaattcattcaataccatcaacggaactcctgcaacagccgacagatatcttctgagagatgtgctgaaaaacaaatggaatttttccggttttgtggtatcagactgggcttctatccgtgagatgatttcatggggattctcaaaagatgaaaaagcagcagcaaaatctgccgtagaagcaggaaccgatatggatatggaaagcggaatttatctgccgtatctcattgatctggtgaaacaaggaaaagttaaagaaagttttgtagatgatgccgtaagaagaattcttcgcgttaaatttgaactgggacttttcgatgatccttatcgttttctcgatgagaagcgtgaaaaggaaacaattggaagcactgcaaaccatgaagccgttctggatatggcaaaaaaatccattgttcttcttaaaaacgaaaaaaatctccttccgcttaaaaaatcaggacaaaaaatcctccttctgggttctttggcagaaagtaaaaattcccctctcggtagctggagaattgcagcagacaacaataccgcagtttctgttctggaaggtatgaaagcttacaaaggcaaccagcttaattttgtggaaggaccaaaattaacaacctcagaacctactttccttaccgaagtggattataacaccaccgacagaaaagggctggaagaagcaaaaaatgctgctaaaaatgccgatgtcatcgtgatggttttaggagaacacggattttcgtccggagaggcaagaagccgaacaaacatagatttacccggacttcaggaagaatttttaaaagaaatttttaaagtaaatcccaatatcgtactcgttttaaacaacggaagacctttaaccatcaactgggcttcagaaaatatacctgccattgtagaagcttggcatttgggaacacaggcaggaaacgccgtttcgcaggttctttacggagattacaatccaagtggaaaattgccgatgacattcccgagaaacgtaggtcagattcctgtttattacaatcatcttaataccggaagaccttttgataaagataaaaatgtattctggagccattattcagatgtagaaaaaacaccgctttatccgttcggatttggattgagttatacaaaatttgaatattccgatttaaaaatcaataaaaaattgttttcaaaaggtgaaaacattcaggtcacttttacccttaaaaatacagggaaatacgatggaaaggaagtggctcagttatatattcaggacgaatctgcttccgttgcaagacctgtaaaagaactaaaaggcttccagatcgtagaactgaagtccggcgaaagtaaaaagatcacttttaatttaactgaaaaagaactcggcttctatgataattcaggaaactttatcatagaagaaggagccttcaaagtaatggtaggcggaaactcggagagtctgatttcggatgaatttggtctggagtaaaaaagttttgtaaaaaatgattccttttttaagcgtaaacttatttaaactatttcagaattaaccacaaaaggcaaaaaagacaatgttaaagcgaatttctatagtgatcaaagcgctcaaaagaataaaaatcaaagatttttaaaaactatggtaacctttttcatttatagtgatcagctttaaataaaaagtttaaacagtataaaaaatcgaagctggtggattccgcttcgatttttttattttcatacaaagaggtcagcaaaatatctttaccctcaaaaccaaaaacgatttacttatatttgccctgcaaagcaaattcaaatgttcagaaaagtaacccttgtttttatccttgtcttttatgcggccttttgtccggctcagcagtttcggccatcaaaatcatctgagatttaccgcgaacttaaaacccttaaacacctgccaaaagtgttataccttgccgctcaccctgatgatgagaatacaggattactttcatggctggttaacgatcaaaatgtagaaacagcctatttgtctttaaccagaggcgatggagggcagaatttattgggaacagaacagggtgctgcattgggattaatcagaacgcatgaacttttagaggctagaaaattagacggtgctcaacagttctttacccgcgcgattgatttcggattctctaaaaataccacagatacttttaaacaatggaatgtagacaacattacagcagacgttgtctgggtgatccgtacattccgtccggatgtcattatttgtcgttttccgcctaccgctgcggcaggacacggacaacacgcggcttcggctgtggttgccgaaaaagcttttaaactggcaggtgataaaaccgcttttccggatcaattgaaatacgttaatgtttggcagccaaaacgtgtgttgtggaatacattccggtttggtgcagtgaatacaaccgctgaaaatcaactgaaaattaccgttgggcaatacgatgcgttgttgggaatgggttatggtgaactggcaggactcagcagaagtttacacaaaagtcagggtgcaggaacacaatctgtagcagggatcaaaactgaatatttttctcacgttgatggagagcctgcaaaaacaacactttttgacggaattaataaaacctggacaaaagaaggaaatcctgacattgaccagtctttagataaaattatttccgctttcaattttaatcgacctgatctcagtttgcccgctttgattgctttgagaaaaaaagtgatgacattaaaagaatcagacctgaaaaaggataaaattaaatctcttgaccaaattattttaagctgcgccggatttatgggggaagtggttacaaacaaagctgaagcggttgccggaaatcactatcaatttaaattaaatattatttcaagagctgtaaatcctgttgttttagaaaatgtaaaatggctgaatcaatctgaaagtttcaacagaaacctttcaaaagattctttaattaccattcagcataatattcagattccatcagatgcagcacttacagaaccttactggttgtcaaaacccgccacgaacgcggcaactttttcagttccgaatgatacgttaatcggtttgccggaagcagaatctccactgaatgtttgggtggatttaaaaatcggctcggaaaagtttcaggttaagctccctttatcgttcaaaaaattagatcccgtaaaaggtgatgtggtagaagctttgcgcattgttcctgctctggaactgaaatttacgcagccgctttatttagcaaaagaaaatgaagatttgcatttgagtctgaatgttaaagttaattcagataaaccgttcagcaatggtaaaattaatctgatgtacaacggagaacaattaggcagtacagatgtaaattcattcaatggaaaagaaacaaccatcgattatgtaattcccaaaaataaactcagcaaaataaatgcatcccgtttacaattggaggctaattttgtcgcagatggagtcacttacaataaaaagcaggtattaattcagtatccgcatttgccttctttacagtattttgcacctgcaacggtaaccgtaatgaaaggtgacattcaggcaaaggttaaaaaagtaggatatatagaaggtgcaggagattttattccagaatttctgagaattgcgggaattcaggttgatgttctgaaagacgaagatttttatagcggaaacggcagccaaaataaactttcacagtatgatgccatcatattggggattcgtgccaataacacagagaaaaaactgggtcgctggatgccttttttatggtcttatgtaaaagacggaggaaatctggtgatgcagtacaacaccagtcaggatacaaccgtcgatcaattgggaatctacaatttccgtattgccacaagtaaacgcgttactgaagaaaatgcagaggttacatttttaaaaccgaatcataaaatactaaactttccgaataaaattactcaaaatgatttcaaggattgggtacaggaacgcggcgcgtattttccggatcagtgggatacggcgtatgaaccgctttttgaaatgcacgataccggtgaagagcctttgcagggatctactttatatgccccatacggaaaggggaactttatttataccccgttggcatttttcagacagttacctgcgggaaatgttggagcggcacgtttatttttaaactttttatctgcacagaaaaactgatgaacaagccatttaaaaattggaatacatggtacattttactggcgctcgctttggtagtgcaaatcgctttttattattggtttactaaattctgggcatgagtacgatagattgggcagttcttatttgtacactggttgcagtggttgtgtacggcgtatttatcgggcgtggacagaaaagcaacgaatcttacctgaaagcagacaataaaatgccttggtacattgtgcttttggggattatggcgactcaggcaagtgccattacatttctttcggcgccgggacaggcgtatacagatgggatgcgtttcgtgcagtattactttgggctgcctttggcgatgattgtaatctgtattacgtttatcccgatttttcagcgtttaaatgtttacacggcttacgaatatttagaaaaccgttttgataagaaaacaagagttcttacttcactgctttttcttttttcgagaggtttgtctacaggaatcagcatttatgcgccgagtatcatcttatcgagcgttttaaactggaatatttacctgacgaatgttttaacaggcggaattctgttaatttatacctacgttggcggagcaaaagccattgcgcatacccaaaaactacagtttctcattattctgggaacgatggcttttgcaggatatttacttatcgaaaatatgccgaatggaattggttttaaagatgcgctttatctcgcgggaaaatcaggaaagctgaatgtcattaccacagaattcgactggaaagacaaatacaacatctggagcggattaattggcggtttttttctggcattgtcatacttcgggacagaccagagtcaggttgggagatatattacggcgaaagacaataccaatgcaaaaatgggcttgttgctgaacggattggtcaaaattccgatgcagtttgcaattcttttaattggggctttgcttttcgcattcttttctctgaaaccggctccgatttattttaacgaacgctcttatcagtatttaaaggaaacgaaacctgaacaggcagcagtttttgaaaaagaacatcaggatttgcaaacaaaattcaatgcagaatcgaaagaaattttacagttaaaacaaaacaactcttcacagcttgaaacaaaaattcaggattttaaaaatacgcagtctcaggtaaaagcacttcacggaaggatagaagaagccatcaatcagtcaaactttaatgcagagaaaacggatacgaattatattttcctgtattttgtgaaaaatacgttgcctgttggaatgatcgggttgctgtttgcggttattttccttgccagttggggttctatttcggcggcactgaattcccttgctgcctgttccttaaaagatgttcatctgatctttaaaaaagaaattccggatgataccactgaattaaaatacagccgacttcacacattagcgtggggaattttctccatcggagtagcgatgtttgccacgcaaatgggttctcttattgaagcggtgaatgtattgggttctcttttctacggaccgatactggggattttccttgttgctttttactttaaaaaaatcaatggggcgaatgtatttattgcagctattttatctgaaattgcggtgattgccgtttatcagttcgatgttgtttcctttctctggcttaatgtgatcggcgcagcagcggtgattgtattttctgcaatcgggttactgttttataaaccgaaagcagtaaattcgtaagcagataataaaagcgtttttaaattataaatttaagcaggatctaaaagaaagtggttgtccgcaatttgttatcattaaaaaaactttgggttctttgctgagtgaaacgcctttgcgaacttaaaaacagttggtatataaataaaatcttagcgattctttgcgttaaatagcagtatgattaataacagatactcaaaaaaagaaaagatcacaatggcttaaaaaatattcggtttttattctttggagcgctttatattttgggtttgtttaaactcattttaaatttaaccgcaaaagagacaaaagactttattggatatatttaaagtgtttcaaaaaggctgtaaagagaaaaaatctttgatttttttttaacttatatgctcttttttgcccatttaagtagttaatttaaacaactaaagtgttaaaatattctgcggtaaaaaagtgtagacaagtttgttattaagttgaaacaattttaatcataaaaataaacagacaaataatagtattatgaaaacaatttttaaatcggctaccgttcttgtggcagccatgacgctttcggtaaacgcttttgcgcaggacaccaaaaaacctgcaagtcctcctgcaacggcaacgggaaagattaaggatgccaatattacgattgcttacagcagtccttctgttaaagggcgcaccatttggggaggtttggaaccgtatgatcaggtttggcgtgcgggagccaatgaagccaccacttttgaaacggataaagatattaccgttcagggtaaaaaacttcctgccggaaaatacagctttttcttaattcctaaagaaagcggaacatggactgccatcttcaacaaggaggcaaaacagtggggcgcctacaaatacgaacaggcaaaagatgctttgcgtgtagacgtaaaaacaaaagcgctgcctgcaaaacaggaaactctggtttacaaaataaacaagaacggattctcgatggattgggatcaaatctcggttcctgtggagattaagtaagtttgaatatgaaatttaaaatcccggttgtccgggatttttttgtaggtttttgtattgatatgagtttagtgacaatacataattttttctaaaaaaaaaatttggaaagacctaaacatgaaaaatatttttaaatttaccattgcaatggaaaataataatattaaaataaaattagactatgcagataatgcggatgtcaatttagataatatgtcattaacggctttggagtcgtttttgaaagttaccactgcacttaaaaatattgctgcttcagtatcaccaaatgtaatatttgctattgaaaaaggttctgcggcggcggcggcgtatggagcgcctcatgatattcaaacaatttttcataaaattgacgaagcaatagaaggagattctgacgatgaaataattacaaaaaatttacgagatattcaaagtgaaattcaaaatgatataatgcgatatcagtttttttattcagatattaagctggaagaaaaaattaagaacgcttcaaaaattaagaaaaaaaatagtagaaataattatcgggaagagtttagggtattaactggtaagtttgatgaggttggtggctctaaaataaattatcatttagaatatggcagtggggaacgtgaaactattgattgtacagaaagcgaagcattggaattaaaagattatttattcaaaacaatttcatgtttagttattaaaaaaattgcagataatgattctgttaaaccaacatttaaacattgtgtttttttagaacctgaacaaacagcattatttaaagaatttataactcaatatcaggaaattaaagaaatattgccacgattagatcatatttatgcttttttcagaaattcaaataatgttgtaagagatatgacaaccatgcttaaggcatctccaaatattttccatgatgtgaatgaattaaaaactttgttaattattagctatggaatgcgtgataataaatcgatcaaacattacagagaacttgtaaataataattttaaatctcaaatgaataaatattaatatgtttgagattatacatactgtttctgaaaaagatatcaaaaatgatttcgttggaatcggaggttattacgataaagaatctaaattaatatatcactcagtattaattattcagtataaagaagaactatatgtttttcattatagtggaaatccgaattatcctctttttgatcaaaacataaacaagaattgctttcacaaaataacttatattgttccagaaattttagttccttcttttattgcacaatgtgaagaaatattgaaaaaggcaaatcctacttatggttatttttattcaggtgaattttatgattttaatggaaatcataattcaattagttcgactggagaaagaatgacttgtgctggattctgtcttaatgtattaaaaggatttttaatggaagattatataaattttgaacagtgggattcttctacacatgaagaaactaactatttggaaaactatagtgtgaggcattccttaaacattgctgatattgcaaagtcgcacagaagaatttctccattagatcttatatgctcaggttactttaaagatttacctattcaaaaatcacaaattgactcaaaacatttggaagtatctgagtacatagatagtttctggttataatatttccagagttgtattttattaaaatataaagttaatctaagaactatttactagttttctaaattttataaaaatatgctaggataaaagaatataaaatattgaattccttctaataaagaatcttctggatattcggttttccttcttgcgttttaccaattttttcaaataatttatctgttatcgtttcttttagtgattcagaaaaataattgatgtaataaaactttttatttgcggctaactgctttattaactttacaatttcgctaagatccgatatgttaaaaagatcaacatccgaaaggtcaaagctttctttataattagaactaaaattgccaatactccaattagcattttgattcttaagagtattatacattaaaaaattttttccgtttattaaatgcttaatatcttttctaatattaaaatttacaagacctttactaggatttacaattgtgttaatttcattttctaacaggaatttaataatatccacatcataggatttatcacctcttaataatactgtatacttcttattatatcctttaagctctttaagaatatcaagcaaaacacttttttctttttccgtgggtttttttgatgaaataatattgattatttttgtatttaacaattcctcatttccataataataaaatatctttgatgttttacctttaattttctgcggaaaatttttatcatgtggagtaatggtattaatattattttgtgctaaaatttcatcattaattggttcatcttgcgaagattctggagaaaacagcaaaatattgtgatctaattcgcctaatttttcataaatcataggtctaacaatattccagtctaatccaccatgaccgcaacctaaagctggtatcgtaatggtttctccagataaatatttcaaataattatgtaaagcatccagtcctttttcaatatactcatattcagatggatctttccagtgatcttttgtagggaaatttataatttttaaattatcaaaaatactttcattccatatctgaagttttcccggtctaagtccatttgaagcacaaagttttttatattcattaaacatttgtggaaataagtttttaaactgtaatgccacaccagcccccattacaccgacacaattcacggtatttattcttatacttgcatcataatcgaaaaaattaccatttttttgaataatcattttaaaactttattttttatttcttcaaagttactatttaaattattataccaatcttcattgatagctaatgtgtctgcttgagataaaatgtataataacattaaatctttttcatttttaattatatttttaagctcgatagtatttcttgagtcttttgatagatcccctaagatatcatgataaccaataagcattgttataatacgtatattttcttcagtgagatcctcaatttcttctatcaaaattcgttgacactgctcgagcgaatcgtagggatgatctggatggtttggttgaattcgatctgaccatttagaatgcggtcccttaccaatatcatgtagataagcactcaatattaaaatagccttatcataatcatctagatttgcaaataattcatttttcttcaaattttcaattacctcaagtgtatgatcagaaacagtacaatcatgcatatcattgctagttgctaattcaaatattcctaaagtttcttcaagatagcaaaaatcagtttctagtttcaacactagatcattaatagagtgaaaattaaactccgatctgtttgctctattatttttgatatgttcatttactgaatcataatgtttttttaaagatttaggcccaataacaagattttgattagtaccaatttttgtgtaataaaaataattgccaccaagaggttgaaaaacaatttttggctttgggttaataccatgattttctaaaatctgtaagactttttctttataattttcattggatactactatatgatcaacaaaactaaaatcaaagttttttattaagacttcggccattttttggtgtttctcttcagatgtatatgaccactttttactatttattatattccaattgagtttatttaaattttcgaaattcttgtaaaattttggtggtattactgtatttgctgaagcatcagagaatattagattttcagattttataatatcagtttttactccaaaatatataacttcgggctgatccactttcttttgattaattagagataataacattggtgtgcgagtactaaagtaaaatgggacataatcatgtactacaccatatgagagtccatcttcacatattatttgcatttgtgctcgtctattttgtatcgatttatttgcaatattatagtgttcaattcccaaatctaacttacgattagtacaaacaagtccatattctaatattgaatctaaattatctaaatgtgtaaagtgataaaagtatttattcatggttaattaatttatggttaaaagtaattaatagtttttatatgattttacggatttccgtaaacaacaaaaataaaaaccatcacaaaatttccactcagtattttccctgaaatttttaaatattattctgaagtagttaaaaacaataaatcccaactctcgtcaggatttattagcaagtttgatatatttcttcatatcaaaatcaaagagttcttgaatcgtaacattaagttccctgcatataataagcaaagtatcatagcgcggattcgtattgcctcgctctaattctccgattgtctttttcgcatgaccagtccttaaacccagctcttcctgtgaaataggtttattggtttcgggatttataattttctttcttaattcagaaattctgtacccaagtgcttttttacagctagtaagatcaatttcattcattaactgtaaaattctatgtttgaagttaaaatttaggatacttataagtatccttttttaattttttatttatatttgtaaaatcaattttgcaacaaagtaaaggcaaaagagcaaccccaaaaaacaataaaaacacaaaatcttcttcgtatgaaaaagaacagcatagactttgaatcccgtttctggtccggccggaagaagcattccgcactcccgctgatggaagtatttttccagtttcatgacctgatcactgccaaagaacgactcaacctcatcatgcaatacgccgcacagcgtaaaacccggattccggaagatccttccgttgtcttttattttcaccagtcgctccggtcgtttattcgcgcagcatattctcttagaaaagatcgaggaaaatggctggttcatgaactttcggaacataaaaatcagatgttgcagggttcgttgtcggaaaaagaataccgcgatccgacaaaagttttcaaaaaagcctttaaaaaatatcgtcttgaggaattcgaagagtttctttcggaaatcgtgtatttctcgctcggaaagttcaacaatgcaccggagcgcaatatcgtagatccgtatttgcatctcatcaaaatacttgatgcagcatggctcattctggaacgtgaaaacaacagggaaaaaattctgcatgaagaggagttaatcgctgaagttcagtcatgatccgaatttgttttaacctgagttcgggataagttatcttaaacgcactattaaaaaaagagactcaatcaaggattcagcttttaagatatagaaaggcgaaaaacttatcaaaggaatattttattaaatatccgttaaacaacctattactgtgcactgatatgaaaatcaattatttataacaggcacttcgacaagctcagtgtgaccctctaatactaaacgcttgatttctagcgatgtcaagctgagcctgtcgaagctttaggttaataaacggacaatcaaaaatatttttgtcttttttaaataaacgaaatgcttttgtttagtttaccaactttcaataaggaaaaaaatcttttgttttctttgtgaaagattaatacaataatataaatcaattatttaatctgtttcttgtcccgaactgaggttgttttgattaaagatagaaggcaattcggtaataaaatttacaacaaaaaaacacttccattattgtatgaaagtgttaaatataatcaggcttttaatttctaaattgttttcaggtacaattcctgcaattcctccgccgaaaaagcttttgaaggaagatgctgtaccagttcgccctgcttcatgatcccgatattggtagcaacacttaccgcattgaaaatatcgtgggttgccataagaacggttctgccttcgtttcctaactgccttacaatttctgtaaattctgcggtggcaatcggatccagtccgctcgtaggttcgtccagaagaagaactttggcatttttggcgagtgcaatggcaattcctactttctgccgcatccctttcgagtaaccgcccaaaggtttttcgtgggcagtttcctgcaatccggtacgtttcagcaaagcggaaagttcatttttatcataattaaatccggcaatcttcgagaaaaaatcaaggttttcaattcctgtaagattgggataaagcaatactgtttccgggatgtaagccatgtgttttttaatcttttcaggatggtcttttacggatatattatggatgaaagcatctcccgaagtggctttaattaaacccaagaggatattgatggtggtgctttttcctgcgccgttctgcccgagaagagcgaagatttcaccttcctgaatttcgagatcaagagattttaaggctgtaaaatcattgtattttttatggagattaatggtttttaacatagctttctgaatttgatgtgtgaaagaattaataataaagaaataataataaaatagggaagaaatacacctgcaagatttattttcccttcatctgtaaaggtttttacggtttgcttcgtccagtcgatggtgtttccgtttacctttttaaagatggacggatagaaatacagcctctgtttttcgtgaaattttttcagaccttcggcgtaattcagttggttttccattcctgtttttgcaacttcgctttgtacacgctgcgtctggatattgggtaaaagataacccaagtaaactgctgccttgtttctgtaaagctttttttcctgatattgtctggaagatttttcagattccacatctgccatatgctgcatggcgtaataccatgtgtaggaaaaactgctgttttcggcaacggtatattgcctgaactgcggatagatcttatggaatttctgcatcgtaggaatttttgcttcgtcccatttattatgatagccttcacgctgttcaatttgcgcctgcaaaccttcttttaccggaataagtttctgaatcagcatatttcctgtcatcggaacaataaaattcattcccatccagaaaattaccaaagccaaagcattccacgaagacgatttctggtagccgatgatccatctgcaaagtgcaaaccagaaagccagatagagtaaacccgctaaagtgaaaataataaaagctaaatctaccggaatatgaatatagaccacagcaacaatcaacaataaaaagtaaaccgaacttaccgccattaggcggattaataatttagcatcaataagttttctcagattttgactttgtaccgaaagcagtttccaggttcctttttcctgatcttcggaaataagattgtagcagaacgcaataatgaccagcggaaaaagaaaaaccagaacaaaagaaaaatcgaaatttcccactgccgcattggcgggattaaaaaaatctgagttgtttttttgctcctccagatttcttattgttaccccctgaatagaagggtttaaatctcttaagccaatatttaaagcagctaatttgggcatttcattcaccagattaaactttacgtagtacagcaaaagaccgatatcgtcgctgtgtaatgccacatttttatcaatgctgtttttttgatatgccgcgctttttgcgataatatcttcattcctgtcgagaaattttttaccggtgtacaaagaactcaaacctgcaaaaagcagaatcaacaaagaaataagataggctttgttgcggtaaaactgtttatataaataatgattcattagattaattttaaaattttagcacttagctcaatcattaaaacacagactaaaagccagaaaataatcgctgtaagagaaagaaactgatggcttaaactttctttcagtgaggtaaattcataccggaaatcgggaaatttctgccagttttcgtgtcctactgaggctggtttttcgccttccttcggtttaatgttactaatgtgttcaatctgcagatcattcatctgctgcgcaagtttgtaacgatagctttctgcctgattctgaaattgccggtacgcaaaataatctgttccggaagccgtcatagacaggtttttaattgccattacaggattgatgaaaccaaaaatctcattcagtttctgctgctgctgatattggttctgaagttttttcaaatggtcaacataaagttttgcgcttattctttcaccttctttcataacaattccaccgtaattaacaggaagttcgtcggtggtttttacgttgtattttgctaataaagaatctttaatatgtttaaaatgcgggtcgtcgggattatgactgtcgccgattttcaaaacatcttcttccacctgagtttcaaacgcaattctggatggggtaggataaagattctgtgctgcaaactgaatccctttcggcaggaaaattaccagaacgagccaggaaccgattaaactgattaaagctgatgaagaagctttgctttgggcagaaattaaaacagttaacgtactgaagaagaaataatagatcatgtacgccggaaaaattacccctgttcttgataaaatatctgaaaaatcagaatcttcagtccagattcccatcagtaaaaccacaggaatcaccggaattaaaaacaccagagaaaactgccaaagcccgagaatctttccccataaaatagcttttggagaagccccctgaacagtcaggattttcagtgtggcatcctctctttcacgaacaatgagcccgaaaccgagaaataatataattaaaggaacaattgcctgaagaataaatgccgaactgaaagccccgaaacggacaagtattcccgaacttcccgcttcagaaagattggcggtattctgtttgtgtgcttcaaggaaaataacatttcccagataatcatccagaccattatcaaaaatgctcagcggatgcccgatcctgaaaaccagatagccgtaatgtgccattctgtgaggatgtttatcgggtctgtgttcccagttttcacgtgtttctttgcggtattcttttactttagaatagttttcgccatattttgtaaatcctattcctatgcttagaaaacaaaacaggagaacggtaaccacaatgagcaggttttgtcttcctttaaataaatcctgtctggtttttcttactattaatttcaggtgtgaaaaagccattgtttaaattttaaaagttgctgtaaatagataatttcttggagctccgggaaaaagtctcaggtaattctgagctcctacccaataagttgtattggtaatattgttaacattaagtgccagctgaagtctggtttgcggtacagaataatacagtgcaacatccagtgtggtataagccggaagttcaaaacttcttgtaaaccacggtatttttttactttggtaaagcattcctgcgccaattccgaagtcttttaaagcctgaatattcgtgaaattgtatctcgtccagagattgacagaatttttcgacgtattttctttagccagaccaataagagcaggattggagtcatctttaactttagcatcaatatagctgtaacctgcataaatgtgccattgcggaagaagatatcctgtaaattcagcttcaaaaccacggcttctgtctgcgccgcgctgtatcagttggtcgggttctgcgggattatttgcattcaccagaatatttttctgattgatttcgtatactgaaaaattggcatcaatctttttgaaaagttttgtttttactccaaattcttttaaatccgacaataaaggcttgtgtaatgaagcagaaactgcaccggtgaaatttgccgtttgcggcatcagtgagatcgtgttagattgcggctgataacccgtaagataggttccgtagatattggtattctcggtgatgctgtaggtaagacccactctgtaaagcattttctgatttctgaatgagctttcttcctgttttttgtaattagtaatatcctgaaaccattcctgccttaatccggctaaaagcttcagctttttccatgttaccaaatgttgaatgtacgccgcgtgagtggtcgttaaagccgttggtaaaggattgatgatatttaaaactgcgtaatcttttccctgatggtttaccgctccgggcgtaaggtcaaaagggtttacgttcggtttcggaaggataattccattgtaaattatcgtttcatacaacgcggcattagctgcattatacgatgaagcaacagttccgtctttcagcagaaaacctcttgccgcatcctgctttccaccactttttttctcccagatatggctgtcgtatcccacaagagtctgatgttcaaatgctccggttttatatgtaaaattgaaataagcattgatattatccacagaccagtgctggattctttcaagatactgcatcattgccagattggaaatcggcttattgttaatgtcgggaacaaaagaattggttgtccttgtttcgtgggtgtcttcatcccaacgttgtttcatatacgaagcattgaaactgatgcttttattgaaatgatgagataagcttcccattaaagttaggtctttggttttgaaataatctcccggtgcgcctaaatttagactaattggtgtactgttaagatttgtttttcctgcaacagctccgaaaataggctgtccgcgatcgagattaccgttcatttcgctgtagatcatctctacatttacagacgttttatcattcggaacaaaggaaattgaaggcgcgattaaaagtccgttgttcttcacattgtcacgaaaagatctggcattctggtgcgctccgttgaaccggtacaaaagtgttctgcttttattcaaaggacctgtaagatccgcggaaagacgataggtatcaaagcttccgccagagaggctcatttcataacgagggctggttaatggttttttggttaccatattaatcgttccacccggatctacactcgacatcgtgatgcttgccggacctttaaaaacttctacacgctcaatatgcggagtcatgggctgaagaaaatagtattgcctggttctcataccattaatgatctgcccttcttcattctggctgattccacggatgctgtactgattataaaaactggcattggaaacacctgcaacatttttaaggacatcgcccagtctgaaggcttgtctgtcgctgatgagttctttggtaacggtattgagtgtaagaggaagatctttatttttcattgcaatctttgtggctgcaaatgaataatctgaagtgtaagcttttgattttcttcctacaatctctacggtttgaatggttgttgagaccgtatctccttttgctttctgtgcatgaactgcaattgatgataaaaagaagctgaaggttgcccaatgaaaaggcttacaggaaataaaatgtattattccggtttgatgagaattgaatgacataaaaattagtaaagtagtattaaaaaatacctagttagaataagaatattcaggatcttattaaacccagatattcgcaaaaagactttacagacttaaaaaaatctgtaggtaaagaattttaactttaaagaaagctaaagttatgaaaaacagggtggagctctcgatgaaaaataatcgagcagacagcgataggttttcgacttcgattgtggaatttcccttttattcgtctgataaactgaaaaatccagcgaggttaaatcgggcagtaagctatgattcatctgaaaatgaagtgcacactggcaatgatcttccttagaaatttttgcctgctgattgtcttttgaatttttaatatcaaaagttttgctactctggtgttgcgagtgatctatgcaaatgctaatgccgctcacgttataaataaacatgagtaacaatgaaacaagaaaaaaagtgtttaacgttttttgcattagaaggaacaaaactaatgataaaaattgacaatgctacctttgtaggcaaaaagtactgtaatttaacctgtgttagacataaaaattgattttcagtattcttacatcgttttagtgcatgaaaatttcttgtgtatgaaatttttagactaagaataagaaactttggtgagttttatctgtgtagagatcatgtttggaaagctttctgtctttggaagtctatcttaattatttgctaatctctcaaacaaaaatcccaactcttgtcaggattttcatttatttatatttccaaaaaaatcttctaaagtaatctctttttttcggcaaattctgattaaagtttttaaagacatattataatcagtctttgatgttcctaacgcaatatttttaattcttcttatggtactttcttctacaccacattttgacgcaaaatctctctgagattccgcttttgaaatccaattggtgtagatgtatttgcaaatagaaatgattacgtctttttcatcgtccatgttaacaaattaaaagaaagagaaaaaaaacagtgcggttttctgtgcgcaataatgaaatattattacatttgtagaataagttatataagtaaccccaaaaaacaataaaaacacaaaaccagtttcgtatgaaaaagaacagcatagactttgaatcccgtttttggtgcggtcggaagaaacattccgcgctttcgctgatggaagtatttttccagtttcatgatttggtaaccgccaaaaaacatctaaatctcatcatacaatacgccgcacagcgcaaaacacggattccggaagatgcttccgttgtcttttattttcaccagtcgctccggtcgtttattcgcgtagcaaattcccttagaaaagatcgaggaaaatggctggttcatgaactttcggaacacaaaaatccgatgttgcagggttcgttgtcggaaaaagaatactgcgatccggcaaaagttttcaggaaagcctttaaaaaataccgtcttgaggaattcgaagagtttctttcggaagtcgtgtatttctcgctcggaactttcaataatgtaccggagcgcaatatcgtagatccgtatttgtacctcaccaaaatgctggatgcagcatggcttattctggaacgtgaaattatcagggaaaaacttccgcatgaggaatcaatcgctgaacttcagtcatgacaatatttcagttcaatccaacgcgatcagaaaattatacctttatggtttaatttaaagaaaagagttagagagtcaagtaaaataagcgggaataaaaaaccggcaagaagtaaacttctaatgccggttttgtgagctcgacaggattatttttcactttgattatcaatgttttaaattaaaattatgtcgtatttgtgtcaaatttcagattttgatacaatttttttaatttctttaatataattttctaattctttaattctgctcttatccgaagtttctgtcgttttttgaagaaaattatcatgatcgggatttagcaatctgtttagatcaatatctggacattttaaacataatgcctcgaaaaaatcctgagaaaatctatttctttcatttaacatggcagacaatgtggtacggttcattcctaataattctgaaaaagtttgaaccttcatatctttaatttccatgtacttataaattttctcgctgattgtcatttagttatatttttttaacatattttaacacgatacgtattgtgtctttggatataatacgtaactttgtcacgtaatgcaacgatatgtcacaaaatgcaacgcaaaagtaatgaaaaaaaagcgacaaaagaaaattgattccaatatagaagaggcatttaaaattatagataactatttgccagctaattataccaacgaggttatggagattgttccttttgctactgctgagaatatcagaactattaagcgaagaaaaagtggtgacttgagaattattgctgcattgaagaaggtagctgaaaaatatgaaatgattttaaattaatacaaatgagctcaataaggctttatcccggaatgtgtgatggcgcactagaaattttctttaatcatgaattaaatgaattaatggctattaacaatggccgtattaaaaaatatgatgacttgcatgaaaacgaagtattttttttaaaagaaatacttgacaacgaaccagaaacaaaaaagattcttagcggttggtttactgatgagtataatcaaaagaaaactttggcaaaatgccgatttggaggtttaaattttactccagatttaaaaaacggcatggctgacccggataatattttatgccctaaaatttctgactgtataggatttggtgttgtttgtaaacctttaaagtataaaggtatagaacttacaagttttgatataaaagcaatgaaactcctaagttcttcaaaaaagaatactgtcattgctgatgagcttgatattcctataggaagtttcgagatctacagaaccaggctttataaaaaactggaaattactacaaaacaagaattggccggagtagcgtttaaaattgggctgatataatagttaaccgaaccccgtttcggcggggtattttaggatttagaatggtgaaattagtttatgcaaaaattgatgttcctggtactatcaaacagattcaaaagattgaaacggaagactgcttatttgcattttcgagaaaactaagaatgtattacgatcaaggtttgattagtattcccgatgagatcagagaggaaatgaacgataaattggataaaatttatagaagccagtaaaaataaagcacttagattaaatttcttataaaaagaatcaaaagcaattttttcttagtaatcgtgaaaggatttaatcagagaagaagtataggtgtttgcctggttattcccattaaattttataaggtttgtagtccactgctgtgaagccctggactacttttaagggattccgacagaataagtgttttaagctgagatacagtgtaagcatcgcttatgaaggtgcaagtccttcgtttcccacaactcatataaaatgagttttctatgttattagttttttacccgaccgatagtcggtcgggtttttatcttaaatattagaaaattaattgattttatgcaatacttgaatgaatcccgaaattaaaaaatttatcgaatcattccgtgaaaaacctgtaaaacaattttctattaatgactttagaaccaaagcaggaaatatttcttttaacaaactcttaaaagaacataatcacgaaatatggcgtacatgcgaatgcggaaatcaagaggatcttcggaaatcttggacttgttctaattgcggcaaaacattatttgaacctaaataaaattagagaatgactacatcaaaactaatggaagttttcaatcttgaagatatcctagatctgccagaaaaagtaaagactgtgttagatggagatttggaagctagaaataatatttatttatctcttattgaggctaataattatgatatgtcttacgactggtttcaagagacttacgaagaagaatttgctcaaagagcaaagggtaaacaggattttactccaaattcggtttcgttgatagcttcaaagctaaccggacaaaaaaaagggtttatttatgagccaacggcgggaaatggcggtatgattataacagattggtggcaaagatgtttgaacagtgcatatccaataatgcattttccttcagataatattgtggtatgttgggaattatctaacagatcacttcctcttcttttgttcaatctttctattcgtggaataatgggatatgtatttcacggagatgttttatcccaagagattaaaatgaaatatatcctggtcaataaaaaaaatgacactttaggattttctgaggtcttcaaagatcctgacaataaaaactggattttcggggaaactcttttccaggaagaaataatttataaaccatttaaaaatatttactaatggtattagatgaagtatatgttaattggaaaaaagacaaacaaaagtttgtgaaaaaaagtactttttcagcctacgtactcttgtatgaaaatcatataaaagaagtttttggtaatgatgaagagataaaagaactggctgtccagaagttcgtttttcaaaaactagatcaagggttatcacaaaaaagtattaaagatattttgattgtccttaagatgattttgaagtttggtaataagtacgaattaatcaaatttaatgattggacaatccaatatccaactgttcgtgagtcccatacaattgaggtaatgaatagagggcatcagaaaaaggtaatggaatacatccaggaacatttcacctttcgaaatattggtattttcatctgtcttagttcaggcatgcgtatcggagaaatttgtgctctaacctggaaagatttggatgttgatgaaggattgataagaatcactaaaacaattcaaagaatttatgtaattgaagacaatgtcagaaaaactgaactattgattgacagtccaaaaacaaaaaactcaatgcgtgatattccgatgacaaaggatttgataagaattttaaaaccattaaaaaaaatcatgaatccggaattttttgtgttgacaaatgacgaaaagcctactgaacctagaacttatagaagttattataaaaatctgatgcgacatttggatattccggatatgaagtttcatggactcagacatagctttgcaactcgatgtattgaggcaaaagctgattataaaacagtaagtgttttactcggtcattccaatattagtacgacacttaatctatatgttcaccctacgcttgatcagaaaaaagcagtaataaataatgtatttaaaaaattctaaatcaagattatgacattttttagaacagacgaaaatggttttaaaaccacattttcaattgatcaggataattttcttaaaaaaaattacttaaaaataaacattcataaaatagcttcaatttttaataaatcagaatgtggtataaatattaggttaaagcagctaaatcttattattcctaaacaacttgctcaagagagaaaatcagcgggaatgtttaaaaaaggaaacattcctccaaatgctggaaaaaaaattgaagattttatgtcagtggagcatatggcaaaatttaaagctaaacaattcaaaaaagataatattcctcacaactcaaaggaggatttcaaggaagttaagagaaaagattcgtccggacactattattggatgattaagttaccagaaaatagaaggttggtttataaacacatttggatttgggagaaaaaaaacggtaaggctggaaaaggatttaatatagtttttaaaaatggaaattctttggattgccggattgagaatcttgaaaaagtttcaaatgcagaacttatggaaagaaatactctacatcgatttcccgaagaacttagaaaaattatacagcttaaaggagccgtcaatcgtcaaattaataaaatcgaaaaaaatggacagcgcaactaaaattcaactagattcattagtgggtaaaaaaattcactataacaaacaaaatataaagttccaaaaatataaagaagttggtggctgcatctgcattgttacggatgtcagaacactgcagtttttcccggaggaaattcaggagaagtttcttgatgttattagtgacgaaaaacaagaaggtacattttctccgccatcaacaatagaaaaacaatcttttattgctctacctgaagaaaacacaacggttaaagaatctctcttagaagctttgaaaaaggtgaaagcggatccatcgtacattgctcaggcgaaaagtgtctgtcagattgctgatgctttagtgaatattcagaaaacggaaattgacttaatcaaacttcacaaagatttatgaaacaatacctaacaagagtaagtcaaatttactcggcaaaaaataaacttgagtctgcaatcttggaattaattaatgctaatgatcgggttttaatcgaagaaaaagatttaaaaacttttaaggatggtatcgtacaacaaataaattttcttaatcaggaatattcaagaagttctcctaaaaaaccaagttggtacaatgtcggagcttcgaaaattaaagattatggaatttctggagttgattgtgttgctttttacatatatgaaatcaaaaataaatatcaaatagaagatggcaagtaaaaaacatcgtaaaaaaattaaaaaaattcatcaaactcgaactgctgtaaagataatcggttgctctgttgacaacttagcccaagcaatagaatcgctaggtcgtgcagcgcaacttgcacgtaaaaattttcaaaacttcatccatgaatatagaaactatcaaatccgaaacagaaagttatttcaaatccgaaggaaaggagaaattttttaaagaaaaagttcagaacactaagtctgatatcctttcagattttaaaaaatggaatcaaaaaaatccggataaaaaattcaccgattttaaagcggaatccattgaagaaattaaggctgggatgcagtttcttagtgagattctttatgtcggaattttccttacagcacttgatgaagtagtatagtaataataaactaatagcaagagtaaacatgtcatttccaataagccaagaagatatttttagagcaaccaacggaggctgggatataatacaaagatttttgccagatgcaaatcttaagaagcattttcgcataagaaatgaagggacggaaagtgcgaatatccatgaaagtggagggatttatttcgtaaaggattggggcgattccggaggctttttccaaaaatcaaaacatgcaattcatatttattcgcattatacaggtaaaacttattttgagtctttacttgctttaggggaagagcttaatctaattgatcaaactaaaaccaaagcaaaaaatattactaagtgcagcttcagtgaatatactggtccggaattaaatgatgatggttttgcctatactataaaagaatttacaccttacgagctcgaaaccttaggtcctttagttacttccgagatttgtaaaaaatatagtctttactctttggaatcttattcatggttaaagaaatcagataatacacaaaaagaattttgcgatgttttcacggttacaagttcagatacaaatcccgtattagctttcattatttctgaaggaggtggaaaaccaaaactttctttacacggacctaaaaaagatgtatctgtagaaccggcaaatcctgccagagagtggatgaaaatctatcagccaaaatcagctgacaaaaaatatcgtttttcttatctgggtaaaaaaccaaagcagcatattttcggcctcgatattctaaaaagaatgaccgttaggaaggaagatgttttagatgaaaacgggcactttacgggagagcaaaaagaagtaatagagaaaattaagaaagtaattatctgttccggagacagggattctatcaacatggcttcaaccggaaaagctgatgcggtagtttggttcaattctgagacagcagatatcactgaaagcgaaatcggattattgtttaaacatgcacatgaagttatcaatgttccagatcttgatcctacaggagtagaagctggaaaaaaaatagctttggagcacatggatgttaagacagcatggcttcctgaagaaattaccaaaagaaaggattttcgcggaaacccgctgaaggattttactgactttatgaaaattaatagcagctacgatgatgaacatcaaactgatcttaaaaggaaggttgaacgtttccttgagttagccaggccggctaaattttggtcaggaaaatggaataaaaggactgagactaccgattataaaatcaattataagaatgctttcaacttcctgaagttaaatggtttcttcagaataaaagatgaaaacagaaaggatggatattactttgtaaagcaagataaacatattttaaaagaagtatctgctcaggaaataaaagactttttcaataatttattagatcagaaacaaagagaaaaaggacttgtactgttccccgatgatttacttaacatgctgataggctcagaagctgtttccgataaaaaacttgtaaatcttgaaaccaaagagtttgattttacagatcacacgtttagtacacaatatttgttttttgataagtttatctgggaagtaaaagctgatcgtgttgaagagatcactaaaggttatagtcgctatgttatggaaaatgatattctaaataatatcataaaaaaacagacaagacatagtcttaataccagggaaattaggcttgaagcaaattatgttgatcgggatggaaagcttataaaaggaaacccttttttcgagattcagaaagataaaaacaacaattgggatgtgaagattctacgtaaagactgtgactttatgaattatctgatcaatgcgagcagagtgcattggaaagaagagattaaaggtctgcctagatcaaaatgggatgattatttgcagcaaaataatttttgcttagatatttatagaaccgaaggatctgcaactggtttagatgatgatcaggtttatgagcaggagctacactttgctaataaagtttatgcctacggatatctgcttcatagatacaaagatccgtcgaaagcttggtgtgtttatgtaatggataatgaagtggttgatgataatgaatctcatggtcgatcagggaaatctcttttatctaataatgcggtcagattatttatgaactctaaatatatgggcgcaagaaaaaaaaatctgttagacagcgatttcctttacgatggaatcactgatcagacagactacgttcttttcgacgatgcggacaaaaaatttcagttcaatcagctttttactgatattacaggggatttgaatgtgaatcctaaaaatcaaaatgcttatctgattcctttccatcaatcaccaaagttttgtgtaaccacaaattatgcgccttttggtttggattcttcaacaatggagaggcttttatttgtttcttacggcgactggtatcatggagcaaaagaggatatggaagcgcgctcaccgcttcacgattttcagaatagattttttacagaatgggatgataaacaatggaatttgttcttgaatttttccgtgcaatgtctccagttttatttgggtacaaaagacaaactcggtgctccacaaggaaatattaaaaagagaaatcttattaccgaaatgggaccggtcttccttgaatgggcagagggatattttgatgatacccgcttaaataattatgtaattaaaaaagaagcttatgagagtattaaattctataatgcatcaatgaagacaatttcagcaacaagcttcaaaaagaagctgaatcagttctgtgagctgaaaggatatgtacttaatccaactgataagcttactacagcagatggcaggattatgagaagtttgaatagtatatcacatgaaatgatatacatcgcagcttcagatattgaactcaatccactttatacggaaatgaaaaaatcaggagtggaagaagatgatgacccttataacgtaaaataatgtacagatcaaattttccaccatttaaagcagatttaaaaaagcattttggatatctaagcttcaactgtactctaatcaatttggatcttgtaggaatccgttttataaaatctggagaagtcgttgtaatcacttatagaggaaatcggaaaacaggtttcatttatgaaggagaagtatttaatgaaaagcaggttttgagagcatatagagatgctccagattcctggaatgatttaaaagagtatgaagaagcatttgaagggaaagttgaagttttagcacctgtaaaagataattatgtatttatcaacgatatggaagttcgtccaaatcaacctctcaaaaatgtaaaattgtaatgaaaaatataataataaaaaccaaaccaatattattttcgacagaaatggttcaggctaatttaaaaggaattaagagccaaaccagaagaattgtagatgaaatgcattacatgtttttagagtatgcttttcatcataaaaaaaatatcacagattggattatcagaacggctaaatatcagccgggagatattctttgggtaagagaaactttttggtttgatccttttcagcaagtttatcattataaggctgatgaagattcatgtatgaaattatttactggctggaaaccttctattcacatgccgaaaaaaatagccaggatcttcttaaaagttacgagtgtacgttgtgaaaggctgaaagatatttcaaatgaagatgcaattgctgaaggaatggatcctgatcaagttcctacatatcgcttcgcagctttatggaaacgtttgaacggggaagactcatggaacagaaatccttttgttttcatatatgaatacgaaataattgaaaaacctaaaaatttcctcattttttaaatactcacaaaacaaatacatttttaaaataaaataatggaaacactaaaaattcagattccagaaggattcaaagtagaatctttcaatgaaaaaaccggagaagttaaatttactccaactgatatcagagatagaataaagactatcgatgatgctatcaaaattctaggagacgatgatcctgatgtaatagactattggaaaatagagtctacagggataacaagccatgttttttggaaccaaaaattaatcttaattatcaaagctctaaacgaaggctggacaccggactggcataatgaaaaatgggataagtgggttaactggttttatcttagttcgtcctcgtctggtcggttctcgttctactactccgtttatcgggcctcggattcgatttgcggctctcgcttttgctttaaatctaaagatttggctcaatatgcggcaaaacaattccttgatatctacgaaaaagcatttacaatttaattaaaaaataatggagacactaaaaattcagattccagaaggattcaaagtagaatctttcaatgaaaaaaccggagaaattaaatttacacccaaaccaattgacatcaaagatagaattaaacattttgctgatgttttatcatatcacggcattagtaatgatgaattcaaaaagcagtgtgaagatcttactgatgatgagattgcttacaaagaattaaagttaattgtatctgctctcaatgaaggctggataccggactggcaaaatgatgatgagtggaagtattatccgtggtttgatatggaaggttcgtcctcgtctggtcggttctcgttcttccgctccgatgatcagatctcgaattcggattgcggctctcgcctttgctttaaatctgaagatttatgtgagtatgcagcaaaaaccttcctggatatttatagaaaatttttcatcattaaataataaacattatgtcaacaattaaagaaagagtaaaaagttttgaagatgcgtgtaaggttttaaacagagaaacaacaataccggacttcagtatgattcctgaaaaggacagaagaccattaattgcacattataaactgattgtaatttgcgaagccctcaatgaaggctggacaccagaatggaataatgataaatgggataaattttatccgtggtttgatatggaaggttcgtcctcgtctggtcggttctcgttctactactccgatggtcagcgctcgatttcggattgcggctctcgcctttgctttaaatctgaagatttggtagactatgcagggacacaatttgaagaactatacaaagagtattttgtaatagattaaaaaaaatatggttgtgcagtgtttgggttttggttcgtcctcgtctggtcggttctcgttcaacaactccgataatcagaactcgaattcgaattgcagctctcacctatgtagcaaaaatataagcactgcaaaccttacctctaggtaaaaaataacaaactttccaaagggcattggtaggaatatccgaaaatgacttttttaaaagcaaaggcaatgaaaagactgaataatttattctcacagatcatcagtatagaaaatttgatgaaagctgatgaaaaagcacagaaaggaaaattaaaacaatatggtgtgaatcttcataataaaaataaagaagaaaatattatgaaacttcataatctgttgataagtcaaaattataaaacttcacattatgatatttttaaagtttttgagccaaaagaacgtgatgtttatcgtcttccttattttccggatagaatatgccatcacgcaataatgaacgttttagagcctgtttttgtggctgtgtttacagcagattcttacagttgtattaaaggtcgcggaattcacaaagcatctttcaatctaagaaaagctttaagaagtaaaactgaaactatttattgcctcaaacttgatataaaaaagttttacccaaatattgatcatgatattttaaaaaaattactgcgaaaaaaatttaaagacattaatcttctctggcttttagatgaaattatagatagtgcccccggactgccgattggaaattatctaagtcaatacctcgctaatttttatttaacatactttgatcattggataaaagaagaaataagaataaaatattacttcagatatgcggacgatattgttatcctgcattcagataaaaaagtacttcaccgaatttttaatttaatcaactcatatctggaacttaatctaaagttagaagtaaaagacaattggcagatattcccggtagaaaaacgagggatcgatttcgttggttatgtccattatcatactcatgtaaaactaaggaagtctatcaagaagcgttttgcaaggatgttgaagaaaagtccaaataaggcttcaattgcatcttaccagggatggacaaaacactgcaactctaaaaatttaatgaaaaagctgatgacggatgttcaactttaaagacttaggaataaaaccaaaagaaaactcatttacaggcaagaaaatagatatcgaagacattctgaatgaagaaatagtcgtctataattttgaaataaaagattctaccaaaaaagagggtacaaagtatctaaccctccagatagaatttgaaaataaaaaaagaatagtttttacaagtggaaaattattaatggacgtaatacaacagatccatccggataatttcccttttaaaactatcataaataaaagcgataaaagattagaatttacataaacggttaattcagtgagattttaattcccggtgataaatcgccgggaatttttttatgcgattctcagcctgttccgggattttaattacactgccaaaatgcaatttcaaaggaaagaccgcggcggttttcaatccaccccttgcaccccataaaaatttattatttttttgtaatattgtaattaagaacatgaattctcgatttgtaaggtattacagtatattttattttttgtaataattaaatagtcattacaaaaaaaatgtaattaaaatatctattacaaaagcattacaaatcaaaaacatagggattacagatgtttttttattttaaatatctgtcaatcaaaacgttattataatattacagacttacaaaaaaattacattattttttattttttcaagttattttacgtaacaatagatactttacgtatctttgtgtaaaaccgtaaaatgaagcaggactttctatatatcaagaagttatatattataccgaaggatttactgtataatggaattcaggacgaagaaatcatattcaaagcaggtaatatggagccggattattttactccgggaactgcatttttttctttcgataaaaaagaaagcacttccggattttattatgttaacgagatacaattttcggttcctggaaaaggagaaaaagaatatatggaaaaagtttctaaggctggagctgttctggctgtgcttgatacagatcaaaaaatagttttttacaaaaatgattacttcagcaatacggctttaaagccggagataagctctaataacttcaaaactaacattaaatatacagtcacaagtttagatgttttataatatgatccgcttaaggccgatagaaattccggaatatttaattccttttattttaaaggaatgcgacggtatttctattctcaaagatggcggcgaatataagcagatactcatagagccgaagagcgttctgggccactttttgttttcgagactaaaggaaccaaaatcaataaaggaattttgtctcacaatttattcaaatacacaaggtaaaaaaagagtggtttcttctgaagtcatcaacttttacaataccgctgagttttccatcgatcttagctttgaagatcttgagcagttttacaaatttctagactcttacttcagaacacacttttgtttttttgtgagaggttattgtaaaggtagctctacaaaaagcaaaattaaaaaagcgatatccgaattttgcgagatgtatgatctcttagaatggggatattcggaaaatcagatgcgtatactttactatcgttatactaataatggtgtactttctttattccaggataataacagattaaattacggattttttggtgtaacacaggaataatgctctgaatatgatttttgtaaaaaaaaatcaatgcccgaattcagactcaatgccaggaagcccaaaaatgtaggcgccggtttaccgacaccaaaaggagagctttatcttttatataaagatgatattgcttccatgccgctgcggtctgaaaaaggtgtaatgtgcattggagatatccacctaaaaaacgggcggcgttttcatattctttatctaacaccaacaactcaaaaaagaaatataaaatccgatggtgaagtagattcacgcggatggaaaaaaaaagtttcaggaaattatccaggagatgagatagatattcacgagtttgcccggcttaatatcaatcaaggctttgtcatcgtgatgaattcttacgatgatgtctatcaccgtatttacggatcttttgaaaatccgctatacttcacaggcgaatttactgatgataatgataagaaaggctacgagctgactttcgagcagaatttcgcagataaagatcctgtacttttttacaatggagaaattattttagatgaaagcgctattgaagatctggatattgactttgaggggttgttcgcccgcagagatggatccaatcttaatcatgaagaaaaagatagctgggcattaatcctttcagattatttcttgagcagcaatatatttcctataagtaatgaatggtaaaaactaaactatgataaactttttaattcctattacggttcttcagcttccgtcaattgctgagcttgaaggaaaacaaggtatgtttattcttcctgatggttctattaatatcaatagacaggatggaacctggatgacgatcaataagcagtcagatcacgcaggaattctaaaaactacggatgtggtaaatactcttccgggtattgcaaaatggtattgggcaggttctggaacctacaacaatgcgggaggaaaaaatattgaggaatttggaattttatcattcaatggagctcagtggcaatcgttagaagttgagattccacaagcgttggtttcacctgaatttaatcctaattctgatagtgaagcacaaggcggaaaacagatttctgatagatatgattatttattagctgtaaacaagagctatatttctaatgaaattccatcatcggaaatattggcatctattttagaaagtaacgtgcagtatggtggcaaatttcttcagtataacaatacaataataactaatgcagcttatccagcattgggagtactgcataatatcgatgtaaccaactcttacaaactaagagtctctcaaatgttcgacattcaggcagggaatttgccggcaattgtaggagttaaagaagacgatacagtttatacgattttaaggtacacagatcccggattctcagggttaatagaatttgacttaactggtgtaaaatcgatatctatccaagtccaacaggggcattttccgcaaattaaattacttaattatgaaaaggttaatttagatgctaaaaattacgcggatgatcgtttcaaagttttggagcatttcattaatccatatgagattcagtgggaggaaattacaatgccacaatctgtcgaagtagataatcaagttatgactggctctttcatacccgtgaattctgctggttttgcgtatggtaaaattcctattgcatcattatctgggtacgattatattaaagtttcaggaggtattaactctggagatgctctttggttgtggggacaaaatctccaaacagcagtatacgacaagcttttgctcggaaataaaaatggagaatttcagttcgaaatagatcatgctaaatatgagagttacggatatacccgcaacaaaacgtcgactaaattttataaagggaaaaaagtatttgttgcaagagaaaaagattctgtttataattttataaaaaacaattctgccgtatcaagacatagaggtgttgatgctttcgctgaatttggcgtaggaaaggatacaaatacaccggcgcaaaataccacagcattaaacagtgcaattgcggctgcacaagctgcaaatgtaccttgttatcttcccggcggtgatattaggcataccggcaatatcgtttatccgcaaaacgtaattttagaaggtgcaggaatgcgattgacccgattaatatcaacaaccgctgcaccggctttagtttctccgacaaccgctgctgatccttatttcggtcttggtctgggttcaatcagagaaatgacaatagatggcgatcatattggaacaaatggaatagaaatcaaaaacgtggcaaactcgaagtatagcaatttacttataaaatcattcacaaataaatgtatgattggctacggtttattgattttcgaatttgacaatgtttattttcaagacgctaaatacggtatttatttggattactcaaacgattcaggattcggaggaatgcactctaatctaattgtttttaaccgttgtcattttttagatttaacaaaaattggtgcagaactaacacatggagcaatgtatacatttaactcctgttcaattggaggaacaggaacagatggagatgatacgacaggattttgtaaggcatataatttaagccctctaaatgaggggattgatattcaatttaattcatgctggtctgaacaaatgcgaggggggtattggttaaatctatctcaagctaacggagtgacaacattcaatgacacgatggtttggaattttgggacgtgtaaaaaaggtattgtaaacaatggaagtagggtgttattatctgggtcttcatatgttaagggtttctctgtgataagcgttgagactaatggaggtgccacaaaattacaaggattcgcaactgttgatacgcatacagaaactgcaggaggtatttttaactagcaaaaaaagttttaaaatgaatggaaaaaatatccttctactcagcatacgaaatcgtgacattagtgacagcggtgctcatcggcaccggtgcttacctcggttttgtcattaaaattaaacagcagaaaataaaattttgggggatgttttggattttcattatgaatttattcgtaacctatttttgttcagaactgctcaatgtggcaaagcttacagaatacaaaggtttagtacagttaggagctgcttatgctggacagtatttcttaacttggctagataaacgaagctttaaaattttagattccttaccaaagaaagttgggatcgatcttaataataattcagaagacaataatcaaaattcaacagataatgaataatcaaaataaaaaatcagatatacagaatattcttctgggctttgccgccgtagtagtcattatagcatttacctattcattttccaaaaactttgcaaaacaggaaattgcaaaaatggaagaactgaagattcataatgaaggtgttggtaaaattgccaatgacaaaatagatagagccctggtacagagctctaacatttccgctcaggtcggtcatctcgaaggccaagtaaaagaacagggcaaaagcgtgaatcggcttgaacggtctatagacaaaaatttatcagaacttaaaaattttaaaaatgaaaaaaataacatttctcctactactgttgatgagcaatttgattttctctcaaagtacaaatacaaaccttactaaatgctttccaataaccacggtaaatgaattgtacaacggtgtaaagcaaggtgaaaacctaaaattagtattatcaaaaacagaaaaagctttgtctgaatctcagaatttggttgctgaacaaaaaggtatcattttcaatcagtcggaaatcatttctgggaaagatcttctgctgcaaaacaatcagtttatcactgatcagaaaataattgttaaagaatccgaaatattctctcttcaggcagatatcaatattttaaaaattaaagcaaagaaggaaggcagaaaaaaattctggaatggtataaagatcggcggagtatcaatggctgttctcggatttgtaggattaattttagttaaataatttttcagaatcaaagtgaatgattaattttataaaaactaaaacccaaaaactttaattatgatttttttatccgcaggacaccacgatgcagatccgggtgctacagctaacggttatcgtgaagcagatcttactaaaatagctcgaaatattattgcttcaagaaccaatccgcagaatttaataatggatcgtgattttgaaacaaatcctatgtatcagggaagaataagacctgctgacggatctgttctgtttgatattcattttaatgcagcagctccaattgcgagtggaacagaatgttttgttaaagcagctgattataatcagaataatctttcttttagaatggctgccgagatttgtgacatcacatctagaatcttgagaattccaaaccgaggtgtaaagccagataaccaaagtcagcatccccgaattggaattttgcacttaggcgcgggaatctctgttctttgggaaatatgttttataactaatatttttaacataaattcttaccaatctaatagagaaccacttttatttcatattgctgaagttttaaagaaatatgatgcattaagataagttttaatcccctttataaggggattttcttgttcactgttgttagcaggtgaaaataaatctacaattcgataaaatacggcaacccataaatcaaaaataatttttttaaaaaagtaacaaaaatgtttcaaaatacttgtaagtaacaaaaatgttacttatatttgctgtgttgtttagatgatcattaacattaaaagaattagactatgaaagtgtctcaacttttgcgagtccttgaagaggacgggtggttcttgaaaaagcacggtaaaaagcacgatatgtatgtgcatcccaccaaagaagatatccttattattcccagacatccgtcgtctgaattaaaaaaaggaacagaggaatctattttaaagaaagcggggttaaaataaccccagcttttttaattcttcagttaataacttcgtaacaacaagaagataatttataacattaaaaatttatgaaagcaatgaacaaaagaaaaaaaagactaaatctcttatgatttagaaacaaaaaaacaaagtaaatattaaaaccttaaaaccaaccccagcaatggaaattaaagttatcttagaaaaaagcagtacaggttacagcgccttttctgaggatttacccggagcagtaaccgctggagaaaacatcgatgaaattatggaaaatttcaaagaagttttggaaatgaaagcagacaacttatcagaagcaggtaaaaaacaagaagctgaagaaataagaaatgcacatattacttattatttagatcttaagacattctttgaatattattctttattcaacaaaagcgaactagctacttaccttggtattaatccaagtttactcagaagactttcctcagggcgagaggaactgtctgaaaaaaaagccttgcaaattaaaaatggattgcataaattagcatccgagatcaagcaaatcaatttcgcttaattcttttaaccagaaatgacttaaacaacaaaaattagtgccgaattttcggcacttttttttgttactacctgataacaaaaaattatctggcttttttaatgtaacacatcattcaaacctcctcctatagttttgcgatatgaaaatattgtctgaaatattaggaggaacctggcttttcactacagatgatccgcagcgtcttaaatctatggttgatactgttttgtctggaggaaaagtaaatgaagaaaaaccattactttctaagtttatcggtgagcctgaagcagatcctcaaaccggaaatgtcacgcttttaaataaagttgggtacatatctatgaccgggataatgactaaatattccggaatgtgctccaacggggcagacagcatttgtgaagaagctattaaaatagatcgcgatcctgattctcttggaataattttccatattgacggatatggaggtaatgctgatgctatgcctttatttattgatctttcttcaaaacttactaaaccttcgatttgtttaatcgacaaagcattttccgctcattattgggcggctgttcttataggagaacatttaatgctttcaaatgatttaactgcagaagttggttcaattggggctatgattatgtttgaaaaacctgaaagagaaatgatcatcattagacctccggaatcttcggaaaaaaatcaggatttcatagacgctcttgctggaaaatatgatttatacattcaaaaattaattccattagctcaaagatttcaagcttcagtattagaaaaacggccatctgtaaaacctgaaattttgaaaggagcaacttattcagctcaggatgcaatcaaaaataaattagccgacagtattggagatataaacgacgcttacaactgggttgttgcaaaatcagaacttaaaaaattaaagtctaaataattatgaaatttttaaccatgttagcgaggtttttaggccttgcaaaagtagagcagaaagataataaagtagatctttcagaagagcagcaaaataagcttaaaagtcttttaggtacagcagaagcggcgacactcattgagcaggcaaacaatgaacttgctggggttgcggacgctcaaactcaattaagagaagttcaaagtcaattggcaactgctaatcaggaaaatcaggcagttacagctcaagtagaaaacttaacgactcaggtaagtactcttcagtcagaagtggcagataagaataaggttattgaaaaacttgcagattctccggaaacaattgttgaagcagttaataccggtccggctgtggttttcggagctggaaaaattgtcgcggttgcagggtttttgatggggctacaaggtcaggttttcgcaatggatcgtccttggaatgcaagagctgttgccggtctttcggctccggctacagatttcaaaaatgatatggtaataaataccttaaatgaagatatcaaaggatttgtggctgaatatccttctaagtttgattcaatttttgataaaaaatataatctgccagaactttggaaacaaaatacaatttttggagtatcagatagattgttatcagctaccatctccgtggaagaagttactcaacctagaaaagctatttgggtggctaaaggaggcgtaacaatcaagccggaggtaatggaggtaaaaccaacgcagattgatcttcagttcaattactggacacttcaggcgctagaaaattcctggcttcacaatttcaataaggaaggttctcaggcttataaaatgagctttatagaatttctaattgttaaatatcttgagaaagcaagatctgaagatgctgatgttttagtaagaggagtattttcagaaaaacctgaaaactacgataagccagttagttatctgatccgaaataatggggttcttaaaattctttttaatgcaagggatattgataaaaagtacagagctttttatcttggggaacttaccgaatctaatgtttgcgattatattgataatatgatccagtctttaccgattgatgtgagaaatatggatcttcagatggaccttgctccgtattggatcagaaaatatcagactagagaccgtgaattgtatggaggtaataacgatttcacaggattaataaaaaacccgagagattatcctaatatagaatttgttcctgtcgtgcagcttgaaggttctaaatttatttttgtgactttcaaagataatgtaaagccgttagaatttcttcctgaggaaaaatcaaaactaacgtttgaaaagttcctgagagatgtatatgcatttgcagattacaaactaggaattggattaaatcatattggcttggaaactacggatgataatcctttaaaatatgaactacaggctgtatggtcaaattttgaacctctgttcgacaaaaatttcttcatccctgttttcgatttcggaaatggagtggtaaatgcaaatcacaacaggattacaccgacacctgactttactacagatattaattccattaaaggaaatatcggaaactatcttttcatcagagggaatatctctctacctggtaacacgaaagttaagaaaaattcagaattagttcttacttcaactgattttgatttgaaatccggaggaactttgacactgatcaaacaaggtaatacatggaaggaagtttccagaactacggctccggaaacggtaacaaatcaagtagaattcaatgatactacaattgattatgcagattcagataaattcatatatatgggtgatgcagcagtagatcttgcatcaattgccggaggatctgaaggaaatacaatcagaatttttggaggtgcagcatcagattccgcattgagtgtaaaaactttaggcaatataaaagttgcaagcacttacgtgatggattcccatgcaaaatggattgatcttattttcatcgatggattctggaatgaagtttcaagagggtaaaaaattataataaccaaaaacctcccgatgtataggcaatcggttttaaattatgagaactgatttaaaaaaatcaaaaaataatgcaggaactcccactcccaaaaaagccaatacaattgccgcttttgtagatgatatcatttcctggccttccgtcgctgaagatggtgtaaccttagttggaaattttgttttcaaacctggaacaaatttcttccgcatctatatgacagctcccactcaggcagcaacttatgagtcttcaggaaatccggatggaaaaggagcaatgaataaatatgttggtgaacacccgggtacaacaaaagaagccttatcatttattaaaaagaatatgggggaaggttttgttcttatttatggtggttgcggcggtgaagaggaaatgaaagttatggggtccgaatgtcatccgttgattttatctgcagctggaaaagacgataaggatggaaatgttaatacattaactttcgagcaggaaatgatcaatagagattttattaaattctattccggagatgtttcttttgctgagccaaaagctgttgcagatgaaaatattattcttgctaaagcaaacggtcctatgtatcaactggcagctgctgcaataactgcagatgtggaatttacatcttcggactttgaacatgatcagattgttaccgtcattggaggcggaggagctgctccgtacgttttgaaaaatacaccttcaggatctgttccggttcttttaaaagaagcgacaaactggatcggtcttaaagattcaattattaatctaagagtagtaaaggcggaaaaaacttatttagtagaagcatccagaaagtagttggttatattgtattttaaattgagaagctgtgtcttttgatgcagcttttttgatgtaacaatgtttcatatgtattcattttatttttgttttatggaagagataaatatatacgatgctcttcgcttgatgagaaagctttctgcagaaaattttcctgtttccttcagctttatttcgtgtgacagatcccggaaaatttccagtggtttgataaaagttaaaaatggaatattaaccaagggaatgccgaacagcaaatctaaatatgcgaagaatcttatagcttatgaaaacacggatactggcgaaagaaaacagttttggcttcctctgttaatgaccgtaaataattataaaattacccatgatagaattattaggagatgatgcgattgtaaatgggcaaagtgcctttacatttgaggttatagataaaaaaagacagcagaatgatccgtacttttctatggatgttttttctccttcagttttccagactacttacggagactggaaagtttttccttatggtgaaaataatgatcttccacttcagatccggaatattgtctattccaattctattgctccaggtatcttaaataaaaaaacaggaatgaactggggaaaagggcctaagctttatgaagaaaaatttgatgaaaaaggattacttttccgagaatataaatcagatccggagattcaagcctggcttgatacctgggattatgaaggatatttagcaaaatgtacaaccgacttttcacatattgaaagttattttacaaaagtgatccagaaccgtgcgtggagaattggcagagctccgagaataaaatcacttgaacatgtttctcctgatcggaaaccacttgtagccggaaagcaatacacaccgacgcatattttattagccagagaaaatgagcctcagacttatgatgcttttcccttttttgacaaatacgatccgtttagatatccgctgagcatgaagtattcgaatttatatacattcgcttcttcattcttcagtattcctcatattttgggatcaattccgtggattattcagtctacgaatgtccccaaatttttggctgcattaagtaaaaattcaatcaacataaaatatcatatcacttcaccgaaagaattttgggaccaaaaacgcgacgaaattaaagatgaatgtaccgataagaatattgattataaagaatccatgtttaaaagttttaagcgcaaaatgcttaaatccatcgaaaaggttttgtccgggttggaaaatactggaaagttttggcattctgagcaggttttggtaatcgaaggaatgaacattatagaaatgggttggaaaattacggttatcgaccaaaaaatgcaggatacggtaaatgctcagatcgcaattgctaataaagccgataaatctacagcaaccggagttggtgtacataatgcaatcgggaatatttcagaatccggaagcaattccggatccgagcagtattacgcacttaataattatctgcaaacaggaattgatatgccggaaatggtgattatggaagtaatcaatgctgcaataaaggcaaattttccaaataaaaaacttaaaatgggattatatcatgacgaaacaaaacgccaggaagatgtctcacaaagtcaaagaaacttaatagctcccagataatgaaaatgttatttaaacaggaaaatttttcacaggattttaaaaaaactgtcggaattgtagatgcggatctctcatgggataagatccgtccctctcttgagttagcgacagacgatatcattgaaatcatcggtctggataattatgatctgatatccggagacattatcccggaaagttttcagcgtttttctgaactggtaagatttgctattgcttttaaatcatatattctatacgcgcctacgggagatctggcaatgactaacaaaggcagaacgatgagacgtgatgattatgaagtaggagctttcgaatggcaaatcgcaaatcacaacgaatctctggaaagatttttttaccgtcacatgaatctgcttttaaaattcatggtcaagaataatttaagtattaatcttgagaaatttcagcattgcaatttaattgttccaacgctcgcagattttgagaaacacttcggactgaatgactcttattttttatacttaaatcttttgccaggattacgggaatttgaagaacttgagctccttcctcgtattggttcggaactctacgaaaatagagatgatctgaagctgaaaactgttctattcaattattctcagaaagctgcagtatattattctatagattggggcttgcgtcatctggatatccagatgttcccaaaatcaaccttcagaacaacggaagcttcaggatcagataaatcaaacagatccacaggaattttaccggctgaatttgctctcatctttgaaaaagacgcaaagcgctacatgaagaaaatagaagcagaaatgtcttccttcagacaaacattaccaacggaagaattcaggcttcctgaacttgattttaatgatgacgataattttgtaagcacatgattgcaatagaaatacctgacaagaaaaaatatctctacatgccggaagaactggctgagtgtgacgcacagcaatacagggattttgcaaaacttcttttccttgctaaagaaggaaagttaagtttcagagatatgaagatctgggcggtctataaacttttaaacctgaagagatccaaaaaacaaaatcctgaaaagcttgcgaacattattcagttatcagcttatatcaataggtttttcgaaatggatgaagagcagaatattgtaaatattaaattggattttacaaaaaatcataatcctgtttacagactcttctggaaatattacggtcctgaagataattttgcggatgttacctttgcacagtattgcgatggcttagatgaatatctttattactcgaatacaggtgatatcaaagcgttgcgtatgctcttctgcatatttcatttgagaaaaggggagacgtacagttataaaaaagccagactgagatctcagcatactttaaagtttgttgatatcagatatctatacggattttatctgtttttctcttctatgcagacctatgttttaggaggtgaaattgatgtgatgggaaacactatcgatctttcgattatttataaatcagacgataagtttgaaagtgagattcctggaaccggtctccggaatacaatttcggatttggcagaaagccaggttttcggaccatacaactcggttcgggaaacaaacatgtggctggttctggtaagactgtacgaactgaagaaaaaagaactcgacgaaaaagcaagaactaaaaacaatgactccactagagcttaaggaacttttatcagaaataaaatctgaaattccggaaataaacagaacaatatcgcttattgatgattcagatttggctgactttgcagcggatatgggtacttccgataatatggcgttggttggtattatcccttcttatcagcattctggggaaataggaaaattcaaaatgcttcctatattccaacttcaggtcatagaaaaaacggattattcggcactcaataatgatgagtttgttttactctatcaaagaactttagttgttattaaaaaggtgcgcgattttcttattgataaagtcgaagatggatgttatcctacgcttagtaatttagatattaccgggcttgtaatagatccggtaaagaaggtatcccagtgtaatggttgggcgttggatattataactgaataattatgtcattgctaaatcgaaggaattccgatatcggagtaattgaagggctcttcatccagaaaactcttcaggatcaggcaaaagtgatgatggcagatactgctaaagaaatgaagggttttgcgaatgctgcgtggaataaaaggacgatgacggtttccggagatacgcttacatatactcataatatcaatgtacgttttattgatatgaaatctaaaagagccagaagaggatataatccatctacaaagaaaatgcgtgcgggaagaaatcagaaaaaatctttgccaattcacaataaacctcttttccggcacaaaaaatatctgcaaagacagcttgctttcggattctcggatgaagtgaaagcaatttttgaaaagatggcaaaagaaaataaccttctaaaaggacaataaaaccagcaaacttatgctggtttttttttattacttttgaaaaaatttaaccatgaaaaagctatttttaattctattgctctgtccgtttttagtatttagtcaggcagaaaaggatactattatcgctgcaacaaatctttccttattggataagtcattggtgtatacagattattccagccagacctgctttacaaaaggtgattatattcagggaattaacgaaaaagatattctttatataagcgatatctacaaatgtaagtcaacatacagagaagatgagtacttcctcaaagttcattttgcagataaagtaggatatgtagacgcgaaaccggataagattctcctttttgatcatgaaaatgtttctgtttcagaattttatgaaaaatttcagaagctgtccgacagccagaaaaatataatgcagtcttacagtcctaaacttgccttccatacctcggaagataaaaaatctgaacttttcagttatttaaggacttttgagaaatatggtatcgctattattaatgcaaatccaacagaagggtattctacaacaggagctgaattcaaaattttgaatgtatcaaaaaaaacaataaagtatattacattcacttattacggtcaaaatcctgtaagggacaaagttggtactaataaaacaagccggggaataggaccggttgagagttttgcaaaaggtttctggaagtttgatatggtatggcttacagatatcgtagaatatcttaagatagtcagtatccaaattcagtacatggatgggaaaattaagacgattcccttcacccagagtctttggatagatgaagataagctctatgaactggaaagtctattataatttaaaatatattactatgaaaaaaatacttttaattttcatgatatttttggggatgtttactttttctcaaatcaaagttacagcagctccggaagagttaattttatctgagaatataattaaagttgacagtctaaaagccgatcagatttacgcaaattctcttaaatgggttaatcaaacttttaaaaatccagatatcattcttaaatccaaaattcctggagaattaatacgaatccgttctttctggaaaatcccgtctaaaggagttttcggaagtacaactttacagttatcttacacaatgcagatagatataaaagatggtaaagtaagaataacagtaaatgatcttaagggacttgatcgatttgtttatagtgcttgttttaagggatcaggagaaaaaagagaaacaaacgagtctcagaggttttttaatgatatagaggattatacagcgaaatttttaaatgatctaattgaatctttaaaaggtaaaaaagaagattggtaaaaaactctaaacatatatggaaaactataatttttttctaaacactaatatttatttatataatgcaaattatattcagggtattccaaatttaaatgaatcttttttagttagattttttccggataacaattctatagtcttcaaggatgaaaaatatcaggaaagatttaggattaaaaaagaagaactcattgatatttacgttgaagatcagtccacaattgatagtagagttagtatttcaagattattgttagtaggtatttttgccttaacatggaaaaaaagagaaactttttctttgtcttacattattttcaaatataaaaatgatataggattggaagatcaaatgattattcagtcagattctaaagattcatttcaatattttacaaatgttaaatataatctgttaaaattttggaaagagatcgaagcaaatccagagcttatggaagaagtcagattaattcaaaaaaatcaggatgataagcagaaagttgattcaaataattcggctgttggatgtattattgctgttgttattgtacttcttgctataatttattttaaactaacataatttatttatatatttgctgtagcgaaactcaataagaccaaaggaagtctttaaaattcctaaattttttaatttaaaataaattagccttggctgatgtggtacaattcctttggatttgttgagtttcgcgactaccacggatgtcaaggtattttttttgtccgtggtttacagaggaacttttaaatagattataaaaatgcgaaactcaacaatcaatttagaagatactccatcattcatggatattttccgttttgccggcgaacaggcagccaaaggttttacagcagataaaaccgaaaaaatagataccccgtgcgaattctttcgcaagaataaactgagttccttcagattaagaactttgaaaaacggaagtgtaagattatccgttattacatcttcaggcgctgagcattatgcaattcataataattttgtgttagcatatatacgattggtacgttcttatagttcaattacaaaacaacctaatcatgaaagatgtacacactgaggaaaatcgtgaagaaaaacaactcattaccattatcaaaagattatttattggatattctccggaagaaattgaagatatgatatttcatgtcttcgaagatgccaatttgcagtccggcgatctctgtaaagaagaaaaacagatgagatccgagtttcatattgcaagcagatctatcctgcgtattttatataagaacccgagtctgctcaagaaaataacgaatctgtaattttttaagtccgcaattgttgcgggcttttttaatgtaacaaagcaattgcctgcaattgcgaacatttgcattaaaaaataatatgaatgaaaacgtattaaaatatcttgttgcagagattgccaatcctcaggaagattataatcacggtcttgctttactgatgcagaatccgggatcaagacactccgtaagatcttacaacaataaaggctacacgaagcaggggttggagaatctgagatatgatatcaaaaaagctttcggaattaaggatgcagatattcgaaaattccgggaagatcttattactccggttttggtagaaagaactctggaaggatttatggaagaaaacagggataaggtaactgagcttctgaaagaactccctgaagaaccgcaaaagggaatgaagctgtacgggaaatatacttttctgagatcgaaagactgtcctaaagaatttaaaattttggtaggtgatgccatcactgcattcgaaaattacaaagcaggccatgaagagcttttccaaaaagttgcagcgcttgcagatcctgaactggatgaaaacgaaatctttgaaattgctaaccaggttcttgaagattttgaaatgaacagagagatccatgcagagcttcagcattacgaggaaaccggaactattcttggaaaacatgagatttttgaagattataatctggatctggaaatatcaaaactttcaccggctgatcttgccacaagagggaataatttgaaatcttatatctctaaaaccaacaagatcattaataccagtaaagatccggaagaaattgaagctgcaaaaattcgtttatcgaaacttaagaatgaaaagactttggtagagaaatatcttaaatctaaaaaataataatatgaaattttcgaatttattttggttacgtttttctaaatggtttagtacgatcttaacatattgctggtttgctttaatctctctttatggttatctggatgataaattttgggaaaatgatcgtgttaatttgatgatcgttgggttctcctttgtaattgtattcttatcgaatattcattctgtaattatagatttatttattaaggctgaacttcaagaagatcatgagagtacagaagaaattgtataaaaacgagttttaataatatagaaactaaagtttttttaattaaaaacgactttttataagttaaaaaaataaaaccatgaatcataaatttttcagcattaaagaattaaaagaatctttggaaaacgatccggtttgtgaaaataacccgatcatcgagatttctctggcgatgcttaaaagtatgagcagaataaagaaaccggaacctaaaaaaggaccggttttcttttcttataaaaatattaatatgaactgatttcaggatgagagcttatgaagtgagattttctcaggaacagctggaggaattggaagatctttccggcgccggatattgcatagataaaatcgcgatgtattttgatgttcccaaaaagaaaatgcgcacagagtatcaaatggaagattcttgggtgagatatcattatgaccgcggtattttactggtagatgcaaaagcaggaattgaactgtcgaaaagcgcatccggaggaaatgtgacagcaatacagcaactggcaaaacttcgtaactcacaaaatcttcaggaactcagaaaaaggataatgtatggcgaagagattgactgattataaccttgatgatctttacaagtggatcgaatccggacagagtagctctgctccggcagagtttattgattatgtgaatttgctggagaagatctaccgaatgatgaaccgtattgatttgtatggctccaaagaatctattatcaagcatctggtaaattttgaagaatctcttaagggaaatcgtctaaaggctattgatctgtataatgaagcatttgaatatttcaacgcagatacaaaaatttctaaaaaagcatggagaaattattatgcctctaagctggatcaggattatgagatggcaagagcggtttcagaaaatgcttcagattttgagaaagcttccagaattgcagacaaagcatataaatttcgtcagcttgatcaggaagatccgccggaacttccaagagaaatgttcaataaaccgattaaggtttacacgatggatatggatcagttcgaagttggaaatgaaaatcttactgagattgaaaactggatcgacgaaaatactaaagaactttcgccaaaagcgattgacagaatcaagcaggaagcgatgattttaccgattaaaatttttgatgatgaacagacagacggtccgaattgattcactttctgtctacgaagatgttgaagtaagatattcaagctggctcaagatgatcacagatcttatggagccacaaaaccttttcttagttctagggaggggaaccggaaaaactacagattatctttccgaaagactgatgaatatatgctatgagatgcctcatagctatattgctttggtgggaaatacttacaccaatcttcttaaaaatgtggttccggcaattattgaaggatggaaccgtaaaggctggattgaaggtattcactatgttgtcgatcagccgcctccggatcactttaaaaagccttataaaactccttacgagtataagcatactatttccacttttacaggaaatttcttcaattatatttcgatggatacgccaagttcaggagctggtaactcttaccagcatcttgccggtgatgaaacaaagtacttggagaaaagccgaatcgaccggttattccctgcacttcgtggagatgccacaatgtttgcgaaatctccgtattatcttggcgttacttttaccacggattatccgaatattattatgccgggagaatatgactggatcctggataaagagaaagaaatgaagctgcagcagattaaatatcttttgcagatttcccttgaactgaacaaactgaccgccggagcgatccgagcagcaaaaaaaagaaacaaaaaattacttgcgacgcttcagaacaaaataaaaaagctttcggttctgaagacgagactgcgaattggttctacattcttttacaaagcatcatcatttgtaaatgtcaatgttctgcgtctggattttttcaaaactgcactggctgctctcggtgaaattgaatttaatacatccgtattatctcaggctcctcaggtagaagccggacaaaggttttatcttgcattcgacagtcgtcacatttatgaagacggcatcattaaagaaaattatttcagatacaaaaccggagataatgcggaaacattttcaacggatcttaaatattgcctggacgatagagtcttagaaatcggtgccgattttggaaatatgatatcaatggtggtggggcagacgcagggaaatgcaatccgggttctaaaaaacttttatactgttaatcagaaaacagagaagatctgcgagcgcttcctgaagtttttcgcacaccataagaaaaaaataattgatctgtacttcgacagatccgctaatgcttacgaagatgttggccgtgactgggcaaacgagatgcgaaaatttctcgagacgtggccggatggaacgccaaccggttggacggtaaacctgaaatcccgtaatcaggggaatattgagcaagatcttgagtttaagttcatgaaagctatgatgaacgaaaattacagggaattgccaaagctattaattgacaaatatcaatgccgccagcttatctcatcgatgaatgttgcgaagcagatcgtgaagaagaaccgtaaaggagtttccaaaatttacaaggataaatcttctgaaaagctgccaaaagaaaagcttccaatgttctcaacaaatatgtctgatgcgctgaagtatctgctttgccgtcgtccatggttaagaatctatcaaaataaaagatctacgttttccgggaaggaatctgatgaataaaacttttttattacttttgaaaaaaacttaataatcaaagtgatatggaaactactgaaaatcttagaagaatagctgcagaaaaatttagcgaacatttaattttttttaaagaaagagttaaattaccaaatataaatgcaaagcaagcacaaatttatgaaactgagcagtttgtagtttctttaaaagctgtatttacaaatttatctgaaactgagattataagactttatcctgatcgagattggaagcagtattttgaacaatatgaaaggctttttgaagtcggttgtgaagattatttgcttgaaattggtaaattataacaaaaacctctgaattatcagaggttttttaaatatcttgcttattcagtttttttgtccatgtcaaaatcctcaccccgattaacatttactctaataacactatttcttagaaattcacttggaagtattataatctgattcgagaattgataatgcaaatgactgatgttattttcgagacatctttttaaatctgttggaaaatttgcagaagcttgttcattaagatctaattctagaacttatgctccgtttttaattgtaattttcatggtataaaatttttagtttctcaaatatacaatttttagacttccattaatttgactttggaaattaatcttaatttttattatataattcattgcaacctcaataatttattcttttacagtccattcgatttagcaactttttataaagttgcactttttttattaatttttctggtgaaaattaaattgaaaattactatttatcaactatttatattcctaataaagcagttgccaataaataaaatcacagaaaagaagattaattttaatcattacaaataatcaatttttatagtaaaaacatacaaaaataacagtaaaactttaagtcaaattttgtaaaatactgaaatattgaattttaacctgttaaaatttaaatttaagatgtttttcacagctcgatgccgacgccgccaagaatcgtaatcgcagttgcagggctcaaatcgctggaaatatggttctgtagctccttttttggctcaaattgcttaaaacggcactttaattatagcttatttacgcctatttagttctcattcaaatttttgatgtaacgtcctttgatgccctatcagggtattattgctataaaaaacgatggctaaaaccatatcagatgagatattaaagcttaagatcattgtcaatagtgatgattctcaaaagcgtgtactggatctcgagaccgccaatcaatcattagggactaagctaaagcagctgaatcagcaggaaaaggagttagacaaacagagaaaggctgaggagaagtctcttaaggctttaacagacaggctcaataagcataatgaaaaactaacattatctgtatctactaccgtacaggagatacaggcattacgttctaaacagcaggcttatgcccaggaaaccaaggaatacgagaagattgaaaaacagattgaacgggtaaagacaaaagctgaagaaggctcgaaggcaattcatgaagagattactcaacttacagagcaacaaagtaagtttcaggaaagctttaataaagcatctgctgaatataagaatctacgcaaggagattgaggctacaaaagatgccatcgcagataataagacaaagattgatgatgagataaaatcaatggatattatgaatatgaccattgatcagcttactcgcagggctaatgatcttaaagaagcaatgaagcatatggtagaaggagagactctggataagaccagggatgagcttcaggctatcaatgatcgggttgctgagttgaacaatggacctgaagaatccggcttcttagatcaattcaacgaatatattggtgttattgcagctgctgtagcatcagtcgcaggattcctaatgaaaatgcaggagatcgtcgatatgaataatgaattggttgatgctcagacggcagtggcaaaaactacagggatgactactcaggaagtaaaagagcttactgaggcttatgcacagtttgacactcgtacaagtaaattggatctcttaaagatagcagaggtaggaggtagattaggagttgcaaaagcagagattcaggattttacccgtgaagtcgataaagcgtatgttgctctaggagattcattttccggaggagtagaagctgtggcagaaaagatcggaaaaataaagggtttatttaaagaaaccaaagatcttgactttgcgaccgctctgaaccagattggatcgggacttaatgaattgggagccgaaggagcggcttcagaagaaaatatgtcggattttgcactaagaattggtcagcttccggagaaattaaagcctaccattgctgaaactttggcgttgggtggtgcttttgaagaaagcggtatcgatgcggaaagagcttcctccggatattctgcatttgttcgtaccgcagctaaggaagctgccggatttgcaaaagtgatgcacttaacgcagtctgaagtagaaagattgattaacgaagatcctttacagtttttcttaaaattctctgaaggagcaaaaggtctggatcctgtaaaactagcccaaattcttgatggtttaaaacttaattctaatgaagttatatcaattattggggcggcgtccgaaaatacagatgccttccggaaatctatcgaatcttctaatattgcgatcagtgaagctacatcattgcaggaagaatttgacaaagtaaatactaatgcctctgcgatctatgataagctgaaaaagaaatggaatgagatctatacaagtgaaaaggttgcagcagtacttaattggattattcaaaccattggaaaaatgttgggcgttgtagaagatactaccggaggtgttacgagattcagagaagggttattatttcttattaaaatacttactattgctaccgttgcgattgtatcatataatactgggcttgccttatctgaacttaccctcgctaagctaaaggaacgcttattagcatatacaatcgttcagaaagcacaaaatctttatactcaagcttctactacacttcaaaacctatggaacatatcaattggctacagccagttggcaataggaaaacttaccggcgctactaatcttcaggcagctgcacaaaaaaggctggacgcggtaacaaaatcaagtccatggggtgcaattgtagcattagtaatggctgcagttactgcttatctgttatttaaagatagtattgaagaggctagggaagcggaaaaaaagagatatgttgaatctcataggtatcagagtgatcttgaaatgatggttcagaaaggaaaaactgctgtacaggaatacactgacagtatagataatctgacaagtgttttgaaagatgaaaattctactcaaaatatccgtaaacagtcttatgaagcattaatcaaactacatcctgagtttatgggtactgtagataaagagtatagggctacggcaaaattagcagaagtttacagcgaactggctcgccaaattgatatttctgcccgtgtaaaagcaagatctgaagcaaagaaaagcctgtataatgaaaatgcaagtttggagcttgaatacatcaaaggggcagcggcacgcgaaaaagaacagagagatcgaaatgatttaagaaagaaatatagttacagtgccgaaagaggaaatagtgcggtatatatgtttggaagctttcaagaacataataaaggtgttgagattattaataaaattaacgcaaataataaagttctgcaacaatataatgaagctgaaaaaaagaggatttcttacttacaagaggctattaaaactgcaaaaggagcaagaaaaaaagaacttgaaatcgaattatatggtcttcttggtatgacaggtcaggaaggttcttccagtacttctaattatactcctttacctgaaaaaaagaaaaaaactaaaaaaacagatgccgaaaaagaagctgagcgaaaagagcgtgaatataaagcaatgcgagagaaaattcttgaaaatcaggaaaattatgatcagaaagaactagaattagaggctcaaaagcaatctgctcttgccgcaaaacaaaaagaaggctacaccaaagaactggcgacaataatctccgaaagtgagaaaaaaattgctgagcttgaaaagcaaaaatatcgacaatctgattttgatgacattgataaaatcattgcgcgtgaaaaagatgctgtaaagaaaaaatttactgaaattaaggcacaatggattgaaagtaataatttgttagatgctaccatcgtcgctgagaaagaaaaaacaaataatcagctattattggttgatcagaaatatttgcagcaaaattttgaaaaacagcaggagttttttcaggagtcacagaatttaattacacgtcagcaaaatagcacaattgcagaatacaatactgttgaaaaacagaaaaaatttttggaaagtcagggatattctcaatctaccttaaatcttattaccaattgggaggaaggcaaatctcagatcgaaaaatactaccaaaagaaaaggcttgaagaacaggttgcctttttacaagagcaggttaagacttttgagcttttagccgaaatgtatccagaatatcttacggatgaacaaattcagaagatggaggcttacagagatactattgcatctcttatggctgaaattgcgggaattaaaaaaactgaagataaaaagttaggtggaaagctagaatcatttggtggtggtaatgcggatatgtttggtatgactgccgatcaatggaaagctctatttaccaataccgataatctttcggagaaaattcaaaaagtaggagctgcattaactgtagcgcgagaaatgttcagtgaatattcaaattttgttcaggctcgcgaacagaaaatgcttgctcaaatggaagctgctagtgataagaaaaaaagaaaactaaaatctgaattggatgccggaattatatctcaggaaacatacaaaaaagaaacagaattaattgatactgatttagatagaaaaaaggctgaattagagtataaagcagctaagcgtcaaagggcaatgcaaatcgctcaagcaatttcaggagtagctatgatggttatcaatgctgctcagactcagcctttttttcctcttggacttgttatgacgggagtggctgcagcattaggagcttttcaaattgcaacaattttaaatactcctcttcctgctgcccccggtgcagaagatggtttttatccagttttgcgaagccaagataataagctttttaaagcgcgtaagagaacttccaaaactggagtttacgatgaaccaaccatgttggttggtgaagccggagctacaatgccggaactggtggtctccggtaaaacaatgaaaaaaatagatcctgaaattcaaagaatatacatgaacgaaatccgaagagtagaaggtttcgaagaagggctctatcctaaagttacaagctccggaaatgatgaaatgctcatcaagctgatggatcttatcaaagaaaatactgaagctacgcgcgaactcagaaaatacggagtaaaaggagtctttgaaaaatcggcaagaacaggcaaggatatcaaagatatgaccgatgaatatgaagatttacgaactaaaaaccaacattaaatatgccattaactaaccctataaattctttttttgtagaatttctcacgacgggtgtcgactgggaaattggaactccttttcctcccaatattccaattaatatagactgttaccgtaacggtccgggatataccaattataaaattacgcttgttgctaatgttggtaatactgctttggatgttgtttacttttctgatggaacgaataccatagatttttttacaaaaaattccggaatctggaatcaggatgtttttgcctgttttgacaatttaagcagtctttctcaaggaaactatccggtagatattattgttacactttatggaatcagtggtggcgcagaaattcttttgaattcgggatcagtttactttgatcttaatgtaaacggtcagatagataatatctctactgataaaggggaatatacgcttatatttgatcgccagtctgacgctctttcaggagatcttaacgttaatattttggataacgttaataatgcctctttaggtttttttaataatcttgaaattttcaaaaataagaatcctatcatcaatgatacttttgttttggagccgaaaacacctttagctacaaattcaaatttaccaattgaaggagaatataatatcagttcttatatatttaaaaatattgtagggggaacttcagtaaagcttaagacttttgatatccagctttttgttttaaattcaaacctgctcgtatcgcctaactttttgcaattcacattacagcaggttaactctgaaacaaaatttgatgttgtaaaaataattaatccatacaatattccttttacgatatcgggaccgtattggttaactttttcagcgaattctggctcaggaactaccaatattactgtgactactttaaattccgccatacttccggtgggagaagctactggagatattgttatcagtttcggatcctcctcaacaaaaataatacctgtaaaattaaatgtaatcagtttcatatatcttacaggtttggaactatataatttttgcctggatgataaaatacttaattttaacagaagggaattattagcaagatttgtaagatctactctctcaataaaattcagaactgagattgaaaccgtaacaatgactgttcctttagtggttccatatttcaatgacaaagcatcgttcgatttgggaaaaaagattcatcaatattttttacgacttaaaaagtctgttcttacggagcctaaaaagccaaatgtttttgataataaagtttggatgtatcccgctgaagtctcaatcttagtagaggagctggatgtggattataatgtagttcacacagataacgtttcgcagattaaattttatccgggtaaaaagcctaaagctttccctttgctttcaaataatttagtgaaacaaagagttatagggtctaaatatattttttcttacattcaggggttacttgatactgaaaaaatatcgatggcagctccaaatgccttagaagatggactgatagtaagagtaaagattgaagataacgaaaataaaataatttttccaaaaaagaagatttttgaaattgccgacaataagcaacttatttattatacgattccgaataacggaccgcaactcattcatatacaatatgagaatcaaaacctatgtcctgaatcatttttcttcacagggcatattaaaaagaatcctgaatattctcagatatatagtcagagtgtaatcacctcattacaggaaaagtatgatgttaaaaaggttacgatctggaatattaacactggttttgttgtaaagaaatgtgtcccggaaatcgggcagattgtggaaagcagattatcttatcttgaatttggtggtgttgtttatcgtggatttttcattactcagaaattggtagaagaggattcctctttagaattagttcagtttgatttagaatttttattgttagaataatggaaattaagttttatacagaaaagtttgttttggatttatcagatgttaaattcagtactcaggaagaaaattccatgatgagcgataagacatttactaaattctttttcccgttcgaggttaatattgatgataaactttaccatacattgggagattatgtaagtcatgaaagcaaggatctggaaacttcaatagatggatatctttttcacgaaaataaaacctttcaggctaaacttgatattcagaatgttgaaggtaatattctcaccggccagatagattatggacttgaggaaattcccaattttgataaaaagctcagcgagcttccgactgagaagtttgaagtttcagatatatatgcatttgccgaagcttgtgttttaaagaaatggcctcaaatcaattataattttccgagaatttttactaaaaaatattcttcagatagtggtttgtgggatgctttcgacggatattataatgatagtactatagaaaatggtgtttgtaaattcaaaagaaattacataaacagtagtggtaatattttcaatgtaaatattgttcacccttgtccacatccgatatatctcttaaaggtaggttttagagatgccggttacgaattgttgggagatattttaacggatccggatttgcaggatcggtgggtcttttccggaacggaagtttttactaaaaaatctcaaataagtttgtctgcagtttatactcaaatggatttcgattctagtgaaaaaacacagcttgtcattggtaacagcgcatatactgcctacaaaagatcttatgataagacaataggggctttaaaaccaggtaattataaaattatgggaagttttacttataagactaatccaggagatactgtaaggttaaagatttatgtaaatggatcagaattattcagtttcgaaaaatattggagtaatagctatgtagaaacaataagtcttgaaaaaaccgtccctttaaatctttccgctaataattcaattcgtttttatgcttatttcattccgcttgatcctgatgcttcagattataatgtaatggattttcaccttttttcagatgttcttgttgatgaaaatgcgactgacgaagacaatggagttgttatgaatttaaatgaaatcaatttagcaaaggctgttccggacatgacattcggagattacgttaatactattaaaaattggttcaattacgatctggaagtatctggaacaaaaatttatatgaaccggttgggtaactcagagcctatttctattaacgattttagagaatttgaagttgaaaaacccaaaaaaaccttcttgcagaaaagatcatttcttcacaaattttcagatttggatgatggctataaaatggatagtattttatatgatatcaaaggggttaagatcaatggttcaaaaaataaagatacaaaggaaattgaagttaatggatatcctcttccagtgcttaagcctaaagataatagtgtggctactgctatagtaaaaaaagattctatggatgtcttagcattggttttttatgatggattggttaatggacagaataattctaaaaatgttccaggatgtgctcatccggaattatttgataagaattggaaatcctggctgagaagacgaattaggggatatcaatacgaatgggaaagagaagtaaattctgaaaagtttggattggtaaatattaaacattcacaattttgttataataatattcatttgattgtatcaatgaataaagataaaatcggtgacaaaacttataaggttagtattgtcaccgaaactattaattaatccataatgaatgtagccatattcgactctttttccacaatgtgaacataaatcatgcttgtaagtatgcttgagtgattgagtatatgttgtaaatctcttacattgccaccttttctaagaaagttggtggcaaatgtatgccttcctgtatgcatcgaaacattttttttaatatttatcttttctaatttcattatattttttagagtcctattaatataatttggatgcaaatgttcaacaaacaatgcaggtaatctgtcaacaattgattttgctgtattgttaagaacaatagtatggtttttatctgttttttcagaagcaaatgttatcgcatttcctttaaggtcatatctttttaatttttgaatttcagaaactctcaagctcgtataacaagcaaataaaaaatatcctaaactcagcgaatgataaggatctatttcatcgctgaaataataattttttagaatttcgacctcacgaatacttagatttgttttattgccagtcattgaacctacttttaggtcatccatatcgaaatttataaaaagtccatgttttctagcaagatttagatattttttgattgttttaatattgcttgctattgtagtatgcttgttgccgtttttataaaggtaacctctataatcttcgaaaaaccctaaagtaatatttttaaaaggcagaggatttttgtaagtttcgagtttatttagtacagacctcgcatgtctttttgtaggctcttttgtagcaacttgttcaatatgatgtcgcataaaagatataaaatcatatttgggtgttttactgaaaaattcatttctgaaggtcttgatatctaaaaagtagcccttagatagtctatattgtatttttatttctgtagctttggaatccatattatcaagtgagaggttgatatcttcagtatcaaacttttttttcactcttctgttttcattatcccaatgttctggttttatataaagaccagtgggaattctttctctctctttattaattgaaacgtcataaaaaatttgacattttccatcttttcttttgtagttgtttaggtaaaaatgtgtgctgattgtcataaatttattttttgtgacaagctttgtgacaagaaatgaaggtctgttctgagccatgttaataatgtttttaaattaaaattactggccggaatcgttgtgacaactttgtgacaaaaggataaaagaaaacaggttaactcctaaatcacagtacttcagatgctgaaataagcttgatttaataattaacctgttatttttgtgaacttgacaggactctattcaaatcatttattagcagatattgacaatattttgaaggtgttaaatgacatatgagtcataatttgatatatagaaatgaattaaaaaatctttaattgtatttgaaattcttctaataaagtaaaggcatgatataattaagttcatacacggttgccttatatctattgtaaaaaagttattaaattaaatgtacatgttatatcgttacctaattttttctaactaataatcattatattctgtttatttttaatatgaaatgaactatgcccttgcagcaagtgataacagtaaataggaaacagctcttatttctggaatattggtattgcttccatattcaacaatttcttttattaattcaggttttactttttgtaataattcatatgtactttctaacagctcacctccagtgaaaaaataatctttttctccatatttagatcttcttagagcattcttttcaagaaaacacccttgtagcccaagtaaaaaagaggctttagactcttcgctaacttttccttcaaattttagtaaggctatcgaaagtatccatgataatgcatttctattaccagtaggaccgtatttttcataatggtttttacactttaaaagtatctgtttaatggtttcaatataatttttgccttcttctaaagaaactttctccgctaaataagaggataagtgttttgttcgatcaagacttaataaataaggtttatcatccaattctacaaaaagttttatgacgtcctctttttcaaaatgatattcaagtactagtaattgcataaaattatctacatagtttttggagctgtttttcatttccccagaaagagaatttatgaatatttttatgtattcatcatcggaaatcagtatcctgtatatcttaaatagtatctttttatggaactctgttgcttcgaagttgtaaatatctccacttcctatattttgactctttacaaacaagctggcatttacgggtaaatttcgaacaaatttaattacagttgcaaagtatgcagatagggatccttttttttgaaattcatcaagttccatatccgtaaaatgaccaaaaattattacatcttcaatcttactatctaacttgcttggtatgctctctaaatcaaaaagtaaccgctcaatttcagaagtatctactacttcaaattttgtagtattgtttttatagaaaagtgggaatagatccttttcatttaaatctgatgtatctatattataaagatttcgggcatttaatgctacaaagacctctttttcacttcgtcgaaatctttcttgtagtgcctcctgatgaatgtttgatccaatacaaaattcattttccatcagctttaaccaagcgaaaagatctgaaggattttcttgcacagctggtatttgaagcatttcaatgattccatcagtaatctgtactttaatgtcgggatagtgtttagaaatattttttagccattcataatgatggtctagttctgagccgggtctacttccctctgcttgtattagaaatttaaataattctggaaaacctgtattgtatttaatagccttacaaaacaaccataataaagattttttttgtgttgtttttcaaaaagaatagaattattttctaaaagtttaaaatactcatcttcaaatagtatgtttttattcttaacggtaatttcgaaaaaataattttcgtcatgttcagcatgcaagatatttaccttcgtttttatattgttatccaagtcatcccaatgaaattgctttagaatactggctgctcttttagccttttttaaattatcacctattagatactgtacgagattatccttatatgttttttgggaaagtgttacatgaaattttgcattaaaaccatatccagatttatcattgaaatatccggatccgagtaatccatctactaataattccaagtcttttttagttagtgggtaattatttctggaaagtaatgttagtgcaaatatttgagaagcttctgttaaaatatttatttttttatagatttgatcgagagtagctttgctatatcgtaacccgagtacaaatgtttgccattcatccaagtctgaagttgaactgaatccacttaaaacaatttctaaagcatcatgctcagaatcagaattaatggtcaacagaagactagcacttagatatcgaattttattatctaagttatacatcagttctctcactaaatctttgtagaatattttttcattaaatagattcacaaatgctattctcaattcaggatgtcttgttaaaatcaatagtgacaggtgtttaatagattttgcaaacgctccgctgtaatcattttcgcttaactgtagtgcgggtaaaaagattgtccaaaatgacgggggaattcccaagtgattgtctgttggaatgttatgagctattgaatctattccggagttactttggcttttaacaaagtcgtctattttattagtaagcgaaatttttttggaatctagccattcgatactgtttataaggtttttaccaatcaataggaagtctttttcgccatcaagaaatagatataaagatgcttgttttgccaaatcattgtttgctaagcaacaatactttaaataagatttcagcttttcttcatcaatttgctccactattaattgtttatactctataaagttttcttctgtaattgatgctagaattgtacgtattaccgttttgctaattggtttttcggtatttatttcaatccataaaattgctgcgtcgatacttttttcttctctttgcgcgcacatttcttcaagagcattaagaacttcgtctttgaaatgcaacgattccgagagtaaaatctcttttgatttatactttaataccccgttgtataatacattgctcgctaatagacggtaatactgttttttacttagatcattatttgttaatattgctaaaacaggtaagatactatggcaaaatgaagtatcatatgcaatatttggttttatcagctctgacaactgtattacgttttttatgttgagcttgaaatccttaattaataagtactgcgaaaatatgtctgcaactaaatttgcttcataatgttttaaaggatgaataggattgagataattatcccaaaaccaatcataaccaacttcctcccctaaatctatgcatattgcgtatgaatttacggaggtcaaatcatttgaattttctactcttaaaggacgaaatggtaaggccgataataacgaaaaatattctttacacaagtctttattttgatattcagctaaaactattgctgtttgagatacgtgttgctttgaccagattaaattttcagaaataatttgtgatatatttttgtagattaataaagattcatttcgctgacgagtaacggttagtgcaaaagatagagaacgccaatctttattgaaatctatgtgtgctttttccgttttcataagatctgaaatatagattcctgcagcacactctaaaataggattggataaaaaagagtatttcttattcgttgtttcctgcaaaaaaatattcttaaaatatttagttgcttcttctacaacttttgccttattattttcagtcgaaatactattagcaataattcgattgagctcaacttcactgactgtacggtcttctgaattcaaaactctccaggcaagttcccctaatagtggttcttttgaaaattttgaaggatataggctgttgaattcagtgaattcgtcggctttaagatccttatcattccagcttaatttatcctgtaatgtactatacaaaatatccccaagggttttatttttaagattttgatccagttgttcatatatagaacagattattaaaggggttgaagctatagtaaataactgtggtttaccttttaaaaaagacagcttttttgttgcttcacttttagctttttcagaagacattccacgcattagcgattcgttgtaaaggattaaaaatttttccttttcatttaatatatcagtagatagtattttccaaccatattcaaaaaatacaggcttgctattgatcaagtatttttgaaaaaggtcaaaagtatttaatttttttttaaactaatcgattatagtcaatcgcacggaagacaataattgtttttataaattaagtatacttagtcgctaagtatttacaatttattacaaagaaatcaatatcgttagaccaaagatttaataggaaaatgtctacggcatttgaaataacgcaatctttaattcttttcaaaaatgaattatttttttttttcataatagtatattaagtgtttaagataaaaagtaataatttaacacaatttatcgtgaaatatttgcaaaaatatttcactactttaattttattcattagttttggaaaaacattaataaccttaaaaccaaattacttttctagattataaaaactactattggcgagtagccaaatccaacaccaaataaaactagttccggaggatccggaaacataactcaaattattacatatgaaaaacaattacaatcaactgagtaagttgaaagtaaagtggttacttgtgtggctacttctaattttgcctttttggggattttcccaaaatacaggcataacagttacctgggactttcaggttggctgtacgaacgtcgaatcctctgatcctaaagagagggataatatcgaaacatgggaaaccataggaatgggatcctgtattcgggtctgtgaaaagtctcaggtcaattacaccttaaactctactgcaaataatatctcttcggttacctggaatgttgcaggaggaacaattaattcaaccagcaataatccttatagcgcaaatgttagctggggacaagcaggaagcggatctgtgattattacaattttttacacgaataatacacaggagacaaagacaatttgtattgaaaaaattgatggtccacgtgctgattttaagattgctggaggtggagatccaagggtttgtcaaaatacacccgtgttctttgataatttatcaaatgcaggaaatggtagcggaatcgtaaattatgaatggaatttcggggatggaagcccaacgacgagtatttttgagccatctcacgcatactctgctccaggaactttcgaggttactttaaaagttactaatcagtgtaactgtacagacgaatacagcatggatatagaggtcatgcaagcagtacctgtcgaaatttcatgtgtaggagtagtatgcgaaaatacagaacatacttatacagcaaataacagctgcaaaggagaatgggatgtaattggcggaacacctttatcaatgaatggaaatgaaatccaaatcagatgggatatggttgatcctgcggatggttttggatatatcaaatacagatctgaatgcggatgccctgcatggactgtagtcaaagttcctgttattgtcagtaacgccgtaattaatggcccgactacagtctgtactgaaaagcagtataagtatgagatgcctagatggccgacaacagaggttcagtgggatgtcaacggccccgctccggcacaggcaacttacagctcgcagagaaatgagatttacctgaaatttgatgttcccggtacatataccttgagcaacatttacaataacactttgctgggatgcggtggaaaaagtgaaatgctaaccatcgatgtcacagaaccacttgtagttactggaggacaggctgaagtttgtaccggaaactcattgacatttaacagtaatggttcaggaaatgtaacttgggatgtaacctataacggttccgtagtatcaactcaaacgactccaaatcctttccagtatcagttccaaaatgcaggaacttatattattacagcacacactcctggaggttgtgttggcgaaggtactgttgtaaaagctttgcctgtaccgccagctcccactggaaacatcactggtgatcagctggtatgtccaggagttccatatacctatactctaagtcctaccaatgctggatttattcctgtttggagcgttacaaacggaacaatacagggtagcaatacaggcagttctgttacagtagtgtttgatgcatccgctacaaattttacagtgagtgttcaaaatagaaccactggcggattaggatgtttgtcagctccgattaattattctgttcagaaagttgacttaagcacaatttcagtttcgggtcctgcagggcaaagtgttttctgccctagcagcagtgcaacattcgtcgctaactttaacggtatagttcctgatgatttctactggacactgggaaattcaaattttggaagtttactgcctcatccaactgatccaaatgcgattattgtaagttttaatgaaatttccagtggaaattctgtttcaaaccttattttgaatgttgttaagtgtggtcagccacctttacagattccttatcaagtaactttgcaagaattacctgttattagcttagttggaggtgacatatgtgaaggaaatccaacgattaatgttgtggtgaatatcccttccaacataaattctggagatttattgtttacatttccaaatggaagtacggaaccatataccttaacatcaggcggaacacaaacaattcctatccctaatcacttcgtaaataatacaagttctgtaatttctcagtcgctgcaactgcaacttaatgcacctaacggatgtaattatgttgctacagcttcagcgaattttaatattattccagaacttgacattacgattactccgggttatttttattccgtttgtcctgctaatggctatgatattgatttaaatgcacaaatcccttcaggaacccccggaacatttcagtggtatcacaatggggtgtttatcccgggtgcaacaggcaatacttattcaataaatcctagtactcaggcatcgcctggtggaaattattatgtaattgttacatcaggaggttgtcaaacacggtctcaaagcattttagtctctgtatcttgtggaactataccaccatgtaatatttctccgaatcctgatttaaatgttacggcagtatggacaagttgtgacaccattgtagcaactgcaacatttgttggcagtccagattcttattcttgggagggtagccctggcttgcaattgcaatcaagcaacgctaatactgctacattcacggttgtagaagcaggagttcataatgttgcattgacattaaactacggaagttgctcaactcaggacaattttgatatagtaaaaaattacaagccagattttaatgcttctataacttgtaacagtaacggaacgtacaatgttacccttacagatacttcactcttatctggtgtcacttcttcggatattgcttacagctatacgatgaatggaggaaatcagcaaggaggacagactgtaacgtatacaggattacaaccagggacaagttataattttgcaattaaacttgatgggcctggatcaatgccagattgtgtgtatactgaaagtgtgactatgccggtattaccagatcttcagtttagtgtttccaatactacaatttgtaaaggcgaagtggttactttgactatccctcctggaaattatcttcctgatcacgtttacagatggatattcgctcaaacttcttatattacatcttcgtcaataacgccaataacattaaatgatgctggaagttatgacattgaacttgaggttacaacaccaaatggttgtacatatttgagtccgataactaatatagttgtaaatgaagcaaatgttgatgtggatctcactggtattaattctaatatctgcgaaaatagtactctacaaccagttattattgtaactccaatcggaggtaatccaatatcgaattatcaatggatgaatggaaatactccagttggagcaccttcctctccaacatttacgccgacggagtctggtagttattgggttgtattgactgacgctaacaccgattgttttgataaatcaaccgctagcgaaccggtacttattacaattcgtaaagctccacaagttagtattgtaggtagttcccaagcttgcgaaaataacacagttactttacaaggggttgttacagatagtaatctacaatacgaatggactcaaagttataatggaggagggaatactgtggtgcagactggtacctcagcaacgtctatttctttgactaccggtgctcttagcgtaggaacgtatgtgtatagtttaagagtttggtcagcaaatgatccatcttgttttggaatttcaacttttacagttacggtgagcagtccaccacctgctccggttgttaatgtgaatattattgagtgtttaccatatcaagtagaattaacgatacaaaatcctggtgctggaacatacaattggagtaacggagcttttggttcatccattgttgtaaccaagggcggtttgtatcaggtaatctatacagcaccgtctggctgtaaatccagtgttcagatttctgttcctcacagtgtagaagacctaatgtggattttccctactggttgttatgatatgtgcccaggtgatgcttatatcgttggtccttacggaaccttcaccaatcatgagtggcagtatttcggaaccatgcagcagggtggttatccaggatttgtagatccatattggccacagaatacaggtacacataatcttttgcttcaacaaggggcttgcttccttcagtctggtgatatgaatatcagtccttctgtaaataacccgggttgtgcaccaagagaatgtaaaattgaggtagtggtaaaagaagtgaaaagggtaggaaacagctacttactattcggagatatttttaacttcggaacgcaatctgtcactgtaacattttcaagtgccaatggatatggaaattatcagccaggcagtatgccgatatctggtggaggaagttccccactgaaccctctcattttcacaccaaactcaagtttccctggtggggcagatgaaatgctggttacagccaatgttgatgggtgtaaggttttggtgaaaataatttttgatgatggtgtttacagtaaatcttcgccggcatacgtacaaacgaatagtgagctactctttgttccaaacccggctaaagaagaagttaagatttcttttaataccggaaacactaaggtagaggccaaaaccctttatatttatgatcaaagcggaattctgaagtaccagcaaaaactgcaagggtctaaaggagaagcgagattgaatataagccaatggctgcaagggatgtaccttgtatctattataacaacagcagatcctctacaggggaaattgctgaaaaaataatccttattctaaaattcagaatgcccctctttggggcatctgattttagttaataattttacttattaaaaattacaaagtcattgttaaacattgaaagaataaattattgataaaaaattactattttaattgttatatttagcattactaaacaaaattattatgaaaaataacatttacctagttacagcaatgctgttttctttgctttatcaaagtcaaacttacacctaccaatgggcaaaaacaggtggagcaactaatgggagtagcgcagtaggatttaatcagggtgatgacgagcatattttagacattgcagttgataatcaaaataacagctattatattacttctatgtatagtagttctcctttattagatggtcagccggtcactaattatggaggtaaagatattgtgttattctcaaccgactgcatgggcaatgtccgttggaaaagaacgattggtggaggtagccaatcggaaaacacacagaaaattgttttggataataatggaggtctttatttgacttttggcgttggtaatacctctagtggagggcaatatttaccacctcgtttcggggataatgatgcattaccacagctaggtaacgatccctttcaagctggacctgcttttagatttggttttttattaaaatataatacttctgatggaaatttagtctggagaaaagattttcaaggggacgtaaatattcaaaactacgcgatggatttcagtccaccactgattgattcacaaagtaatattcatgtcatatgtggatttcaatatggaacacatttaaatggtatgattaccgttccaagtacttataataccatacaaaattatcaatattatgtagtgaagtatgacacggcaggaaatatagtaggtactccttcgctccttccaatagctggaagcaccaatttccgcatcggttatctaaattggatgtacgatgaagctaacagtcgctactatcttgcaggctctagaaacacagagggaagtggatcaaatggtaatgcactttcatataataatgttccgattaacaactctggttttttacttgcattcagcagtacaaattataatgaactttggagaagagaatttgtgaccagcgcaagtcagggatttaattttatctatggtttaaagaaagaccctacaacgagtgatatttatctttccggaaaaataggtaaatcaactaatacagtttcttttggcagtgattataattttacaagtcctctaataggatccattagttttgtaatgaagttggcaacaaccaacacctcaagtaatattatttggagtacatctccaacttctttatctgacggctctactcaagttggaatgcaaaacgtccgtatgcctatcgttatcaaaggcaatgaagttctttttgccaagggaagcatcagagaagtttggggagcgtattctatggtgcgtccgctaaacgacagtacggatcctttgcttgtattattaaataaagataccggagccgtaaatgggacttatgaggtacagggcgactatggtcaacatgatcattttactgccgtggctgtagataacgacaataacattatgttgggtggatttatcaattcacaactatttacagcaactaatgataacattccgacaatcagcaatgcagccggatctcaaaaaacagattttttctttgctaagcttgccaatgttgcgtgctctacaatggcggtagaagaaacttctgcagaagctggtttacagttttatcctaatcctgttaaggatttcctaaccattaaaagcaaaaataaactggaaagctacggagtgtattcttcagttgggcaaacagttttaagaggaaacttagggagtataaatgctcaaattaatatgagtgctttgacagcgggtgtttattatgtgaaagtgaaaacggagaaggctgtggttaccgagaaggttatcaaaaaataaattcataggactaaaatatctaaaccgcaaagattcgtctttgcggttttttaatggaagtagaatttaaatttagcatgtcaaggtagttatttaggatttttaaaactactctaaaatgtacggctttatcaaaaacctatatttaaattgcacaatcttgtaagaaatacagtgttttctaatcaggtattttttacatctgatcaagatgctatgtctgaagtactaagattgtttgtttgacctaggtaaaaagattcataaagaaatcaaaaaccttatcttaatttatacaggttttttaacaacctgtatttattttacactggatattttccaagtctatagttattttatattctttagttaaagtgaagtaaatgattttataaaatgtataatctgattttcttgttttaaaagcgaagatgaattgataaacttatactttaattttttgactttttacgcaaaaaaagcaaatttttgtatagttgcaagttgtgttttgagcatctcggaatgatttccgatgctcaaaacaacttgccctttgcagggggcagaaaacaccttccgaagtcagggttttgtatggattttaaaatggattagtgatgaacgataacaacaaaaagcaattgaaaaagaccggacgccgccctaaagaagacccggcgacaatccgctatacgatttcctttaatgagcaggaacacgactgctttcttgccctttttgataaatcaggtatgcaggtaaaggcgcatttcataacgtcctgcatctttgataagaccataaagaccattcagattgataaaggaacggttgatttctatatgcggctgacctcttttcacagccaattccgttccataggtgtaaactacaatcagattgtaaagctgttataccgtcatttttcggagaaaaaagccgccgcattcctctataaattggaaaaacagacggctgaaatggcaatgttgtgtcagaaaattattcagctaaccgcagaatttgaagccaaacacctaaaaaaacagcgttaaaaatgatagcaaaaatcggaagaagcgaaaatctgtacggggcattggcatataataacctgaaagtggagaaagaaaacggacaaattctgtttacaaataagataattgaaacatcaagcggagcatataccgtagcacaattgacccaatcttttgagccgtacctcatcgcaaatcgcaatacgcaatatcataccctgcatatttcgctcaatcccgacccgaaagataaggtaagcgatgataagtacagggaaatggcggaagaatatatgcgggaaatgggctacggcgaacagccttttgtggtcttcaaacataccgatattgaccgcagccatatccatatcgtatcggtctgcgtggacgaacagggcgtaaagatttcggataaatttgagaaaatgcggtcgatgaatgtgtgccgtgaacttgaaagaaaacacggtttgatacctgccacggagaaagagcataaccagaccgataagattttccgtccggtggattatcgggcaggcgatataaaaagtcagatagcttcggtcattcgccacctgccgaactattaccaatttcagactttgggagaatacaatgccttgctttccctgtttaatattaccaccgaaaaagtcgagggaaaattacacggaaaggcacagcagggtttattgtatattcccttaaatgagaatggagaaagagccggacatccgttcaaggcttcgcttttcggaaagaatgcagggcttccggctttggaattgcattttgcgaaatgcaaaataaaactaaaagatacaccaagcaaacagaccttacaatcagccgttaccattgccctgcaatccacgaacaatgaacaggcttttaaaaagcaattaggagaacagggtattaatgttgtagtgcgaagaaacgatgcaggtcgtatatacggaatgacctttatagaccacaattccaaaaccgtatggaacggttcacgtttaagcaaggaactttccgccaatacctttaatgattattggaacaacaacatcaaaccggatattaaagaaccaactgtacaactgccaaaaacgtccccatcaaatgatgcggatcttcctgcggaagaaccacatcatttgttcgatttcttaactactgaaaaacacgaagacggtttgatagaagcctttggcggtttactcctacccgaagcacagggcgaagattacgaggaacaggattttgccaataaaatgaagaaaaagaggaaacgtacaagaggtcagaagtaatatttagccaaacaccgccactcaccgccattgagtgccacattcttatagccaagctatacagctcataaattcacgcccgaacattaaaactgaaaaataatgcagggagaagacgatttaagagggcttgccaagataatggcatttatgcgggcagtgagtattctattggtactgatgcacctttattggttttgctacggtttctttttggaacgtggctggacattggaaataatcaacaaaatattagggaattttcagcgaacggcagggctgttttcgcataccctatataccaaagcctttgctttggttttgttggctttgagctgtttgggaacaaagggcgtaaagaatgaaaaaataacgtggactaaaatctacgtggcgttgggcgttggttttgtgctgttctttctgaatacgcctttattaaagctacctccggtaatcggtacatttctctatatccttaccatttcgttaggatatatcgccttgctaatggcaggtgtttggatgagccgattgctccgtaccaacctgatggacgacgttttcaacaacgaaaatgaaagttttcagcaggaaacaaggttgatgcaaaatgaatattctgtcaatctacccacgaagttttactacaaaaacaaatggaatgacggttggataaacgtagtcaatccttttcgggcaacgattgtgctgggaacacccggttccggtaaatcttatgctatcgtaaacaactatatcaagcaacagattgagaaaggtttcagtatgtatatatacgacttcaaattcgacgacctttccacgattgcttacaatcatctactgaagaacagggataaatacaaagttcagccgaaattttacgtgataaactttgacgacccacgcaagagccaccgttgcaatccacttaatcccgattttatgacggacatttcggatgcctacgaagcggcttataccataatgttgaacctcaacaggtcgtggatacagaagcaaggggatttcttcgtggaaagcccgattattctattggcagccattatttggtatctgaaaatctatgataacggcaaatattgtacattcccacacgccatagaattactaaataaaaagtattcagacgtattcacgattttaacctcctatcccgatttggaaaattacttatcgccttttatggatgcgtggcaaggcggagcacaagaccaattacagggacaaatcgcatcggctaaaattccattgtcaagaatgattagcccgcagttgtattgggttatgacaggcgatgatttttcgctggacatcaataacccgaaagagccgaaaattttgtgtgtgggcaacaatcccgaccgccaaaatatctactccgcagctttgggtttatacaattcgaggattgtaaaactgattaataaaaagggacagctaaagagttccgttatcatagatgagttgcctacgatttacttcaggggactggataaccttatcgcaacggcgagaagtaataaagtggctgtatgcttgggctttcaggacttttcgcaattaacacgtgattacggcgacaaagagagcaaggttattcagaataccgtaggtaatgttttctccggtcaggttgttggagaaaccgcaaagagcctgtcagaacgcttcgggaaagtattgcagaaacgccaaagtatgactattaaccgtaacgataaatcaacttctatttctacgcaattagacagccttattccggcttccaaaatttcaaccttaacacaggggatgtttgtcggttctgtatcggataacttcgatgaacgtatcgagcaaaaaatatttcacgcagaaatcgtggtagataatgaaagagtttccgcagaaaccaaagcatatcaaaatataccgcagattttatcttttgtagatgagcagggcgaggataaaatgaaacaggagattgaaagcaattaccgtcagataaaatcgcacattctgcatatcgttgaaaatgaaatggagcgtatcaagaacgacccgaacttacagcatttggtgcaggagggatagtttattaatcaaacaagaccattcgggatacgttgtttgattaataagccatcatcatagaatatagttttgtgaatactaaattaaagcctttcggggctaaatttgtatactttttttacttttgtattttatactcagcgattattcgattttaccttaaacctttaaaatttattttttatatttttacggtaacgctcaatatctgattaacttaacaacaaccattggatgataagtgtatttacagaacgtgcattattacggaaagtgaaagtaggggactcttttagcccccaaaagactactattgttatcattgaaaagggaagcatcagcatcaaatccaatgagttgatacatcactacaaaaaaggaaatttgggtatgataatacccaataatgtatataaggtaaatgcctttacagatgatgtgaaagcatattttattttaatagacagggatgagctaaacaataaaacttcttttgctttcaataaatatgaaatgcagcaagcacttcgcagcagtaacaataatattgagaaagtttcagataatgcttttgctcatatactcaacttatgtgaacagcttttttattataatcaggaagaaaaagaaatcacgtttagccagcagataaagctgtctttattcacatcgctggtgtatattttggtgggagactttttacagggaaaaggaaaggacataaacattcttgaaaattcaagaaaagaaagcatcacgatgaagttcctgcaattggtaagcataaatttcatgaaagaaaaagagcttaaattctatgccgacaaattgttgatttcttccaaatacctttccaataccgtcagggaaataaccaatcagccaccgtccaaatttattaccgaagcattgctgaacaatgcaaaaatcctgctgctcaattccgacaactctattaaagaaatatccaacgagcttgatttttctgaccaatacgcatttggcaaattctttaagaagcacacaggacttagcccctctaatttcaagaaaacgaataaattagtcgatgccatttagcatcgaacacaccctttcctttaatagtagtatttagtctgtgcagatactgtttgaacctctttttaggcattataaacctttactgaaagtcctgcaaacccgaactttgcatcagtattaaaatttacatcttaaaaatacagtctatggcaatattttttaaaacaatccgaaacaccataaagcattggtatgtacctgctatcatcggggcattatttattgtattgggcggttatctgtttacagtccctgaatctgcttatctttcattggttatgcttttcagtatatcgtttttggcaagcggcattatggaaattttcttttccgtacaaaacaaggacgagttagacggttggggctggtatttggcaagtggaatattcacactgctgataggtgtcatattgataaccaaaccagtcgttgcagctaccacattgccattttttattgggttcagcttattgttccggtcatttcaggggcttggtttcgcttttgagctgaaaaactatggcgtgttgcgttggggaaatctggcaattgtaagcgtactcggtatcatcctttcatttttattgattgtcaatccaatctttgccggaatctctttagtggtaatgacagctttgtctttcatatttgcaggtattgcaagtattgtattagcgtttcaactgaaaaaactgaaaacatttcctgaaagaatcaacaaagaactaaaggagaaaattgaacatctaaaagaagaatactataaaaatatccaatccgaggataaatagaaaatagttgcacatttatccttaaatggtatgcaagggcagtcttttgtgggctgccttttttattggtatgtttcggaaagcattagcaacataccgtttgaacctctttttgtgaattactaaccttttatgaagaccctttcattcagaactttgccaagtaatatttaagtaattaatgacaagttcaaaatgaaaaaaatcactatgctattgttagggctttttgttttttcgcaaacaatctatgcccagcaaggtcaagaaagaacgataaccattaaagagttatttgagctgaccaaagaaaatcatccgaatctgaaagtttccaaaacagatattgccatagcaaagcaagatgtagaagttgctaaaaacgcacaactccctactttgaatgcggctttgcaaggatattatcttggggatgcccacattattgataaggatttttccaattccacaagagtagatatgccacatttcggcaatactttttcgatagatgccagtcagttgatatggaaaggcggaatggtaaaaaatggtatcaaagcccaatctttgaaagaagaattaacagagctgaattatcagtcgaacgaacaaagcatcaaacttttggtgttgggctactatctggatttgtatcaactactgaaccaaaaatcagtatatcagcagaatatccaattggcggaacaacgcttgcaaaacatcaataagttttataatcagggaatggttacgagaaatgatgttatccgcggcgaactgcaattgtctaatcttaaacttgctttacaggtcgtagaaaataaccgtcaaattctcaataaacagcttaccaccgctttgggattgtccgaaaatacacagattgtgcccgacgaaaccatacttagcaatgttcctaaagctttattgatggaagattacagagcattcgcacaaaatcatccaaccatattgatgacaaaaaaggcagttgatatttatgaaacctccgaaaagataacccgtgcagaaatgatgccttcgttatctgcatttgcaggaaatcagctggcacgtccgattactacatcaacgcctgctctggatatgtacactaacggatggagtgccggactttcactgaattttaatattgacgcactgtacaaaacccctaaaaaaatcaaacaggtgcgttttgaaaaagacaaagccattgcacaggcaaacgaagctgaacagatgattgacgttgctgtaaatgccgcttacattaaatacaatgaagccgttactcagaacaatacacttgaaacaaacaaagaactatccgatgaaaattatcgcattatgaacagtaaatacaacaaccagttggctattttattagatttgattgatgcaagtaatcagaaattagacgcagagttacagtttgctaattcggaaataagcatcgtttatgcgtactacaaattattaaaagaaagcggaaatttataataaattgataaacttaaagataaaacaatgtcagaaaatatagaaaacaacaatcaggaaaacacaccgcaaccgactggacaatctgcggaaaagcaaaaggtaaacaagcagaaaaccaaacaaaaaaagaccaaaatcatcaatattttgatactcattttggttttgggcggactttattttgtggtaaaatcctatttcaatgtcgggaacgacaaatacaccaatgccgcacaggtagaatcgttcatcaacccgataaatacaagggtttcggcttatatcactgaaatccgttttgtggaacatcaatatgtgaaaaaaggtgatacattattgatattggacgaccgtgaaatacaaactcaattaggacaggcagaagctgcttatatgtcggctttggcttctaaaaacgcaacatccagttcggtaaaaacagcgaccaacaatgtaaataccgttggagcaaatgtgcaggcagcaaaagcgaatatagaagctacgaaagcaagactgtggaatgcggaacagaattttaatcgttacaaaaacctcttggcagacgaagcagtaacccgtcagcaatttgaccagataaagactgatttcgaggcacaaaaagcccagttggaagcccagatttcgcaatatcaatccgtgattaattctaaaactacgagcgaattatcagtaaacgaagtacaatcgcgattgggaatgaacgatgctgacatcaaacgaacgcagagtgctttggatatggcaaaactgaacctttcttataccgttatcacagctccccacgatggcattatgggaagaagaacagtcaatgtagggcagttgttaaacccaagccaacaggttggaactatcgtggacatcaataacatttgggtaacggctaattaccgtgaaaaacaaatgggcaacgtacagataggcggtttggcaaaaatacaggtagatgcactgggcggtaaagaatttgagggaaaaataaccgctgtatcaggtgcaacaggtgcgagatatgccgctgttccggtggataactcaacaggaaattttgtgaaagtgcaacagcgtattccggtacgtattgaatttacagataagaataaacccgaagacttgaaattgcttcgtgcaggaatgaatgtagaagtgaacttaaaataacaggaagatgtacaataaaggtccatttgcaagctgggttcccaaacctttgatgctgttgctgattttgacgatattattctcgatgatgaccgtttccggagtatatacaagtgtcattacggatattacgggagcaatggctacctatacggaatatatctcgcttgccaataacgcaggtacaattggtatgggctgcgccataatgatactgatgcgtgtcaagatgcgtttccgtaccaaagaaatcatttcagtgtcggctattatccttgctatattatcatatatgtgcggtactacagatagtcctgttgttctgataagttgcagttttctcataggttttttcaagatgtttccgctgatagaaatggtattacccattatgttcatcattgctccgacaggagaccgtggaaaattctatgctgtattctaccccttgtccattggatttgggcagctttcggcttattatttttctacaatggtgttcaatggtagctggcagacaccttatatgtttatgtccgctacgatgcttgtaattgcggcagtatcgcttatttttcaacataaccaacgatttggtttcaaaatgccactgtatcagatagactggctgtcacttgttttgatagcaacctcctttatgtcgcttaattacttttttgtgtttatgaaacaacaggggtggtttatttcgccttacattacgggttcattgattttcggagtggttctttttgtagcattgatatacaggcagaaatcgctcaaacgaaagatgattgatttcggagcatttaaaaagaaaaatgttatccacgctaccatattattgttctttctcgggctatatctggcaagcacatcggtatatacacaatatacagttggtgtattagggtataataacctgattaacgcacatatcaatctttggatgatacccggtatcgtcattgcgggaatattggcatttttcggttttaaaaataaatggtacatcaagtattatatcgcttttggatttgtgtgttttgctctgcatacattaagtctttacctgattatacaaccgcagatggacatccgctacctcgaatatgcgacggtactgaaaggattgggaatgggcatcctgttcattgggttatggttttacgctaccctcaacctgcaaatgaatgaaatgatgggaataatggttatattaattgtggtaaggtcttttctggctacctcattaggcagtgcaattatcggatgggcaacttatcagtcacagtggcaaagtctgaacgacatttcgatgtatctcgatgccggggaaattccgaacggaatggcaatataccaaaacatcagcctcaatgcgttaatggcttccgggaaaatcgtattgggaacattaacctggctgattgtccctatactgatatttattgctacacattcttacggaagtttccactacaaacgggtggtgctgttccgcaaagcgatacggggaaattcaatcaaaggttatcgtttatcttaatacaaattattatgaaatgaagcataagaaaatattcatttccatacccaaaacaatgaatattttcttatgcgaaattccatctgaccattaaaaacaataaaaataaacagatgaaaaaaatactttttctgacagatttttcagaagtagcaaagaacgcatttttatatgccctatcgcttgcagataattttaactcggaattgcacatactgcatattacacctattattgaaccgaagacggacgaggaacgctatcgggtacaccctttggcacagatgttcaacgattcgctggaaaatgatgagtggaacgaatttaagacagaagcaaaaaaattggagcagttggctcataacaacaataagctccacgttcccgtagagttccattttgaaaatggctatttccaagatgtaattgagagccatatcgtagaaaaatcaattgacctgattgtaatgggtacgtcggggaataacactatagacaaaaaactgttcggctcgcacgcagtgaggctgattgacagtggttttgatataccgatattggcagtgcctgcaaaagccgtttttacctctacgggggcgtttgccgctgcggtaatgctcgttgaaaatgaatgtgtcattatcaggcggattgccacaaaactctccccgtcagagacacctttaaaatgtgtacacatagtcgatacagaagaaaaagctatggctgcacaacaaaagaaagcacattggcttacaaattttgagggtcttgatgttcaggtggatattgttattgatacggatatagaagacggcttgacaaagtatgtagaagataactatatcaatatcctaagcatcatacatagacaattaccctttatgaaaagattgttcaatataaaccatagtaaaaggctgctacgtctttctgaaacggcaatgctgatatataatgtagaagataaataaaacatttgttatggaaataaaaccaaaaattcttttgcctgttgatttttattcaacatcagacaatactttcttatatgcaatagcatttgcagaacagttcaatgcagatgttcatatactaaccgtgttggaagatacggctgaaccggaacaaaacaatcaattcagaaaagggctgaaagaacgtgaaatagaactgttctatcaacagataaaaagctataagaatacttcggaagtaaacctttctttcggactgacaaaggaaagtttcacggacgcaatcattaactatttacagaacaacgcgatagatttcctgataatcggatatgacaccaacggaataaaatccaattcacaaattaggcaggaaatatcagagaagaattataaagtcaatgtgccgattatcatcgttccggaaaaagctactttcagtatagaaaacaatatcgctttcgatgtacgactacatagtgaagaatgtgaattattgaaaaagctcgccgttgatttcaacaaaaaaggcaggttagtgcattgtatacatatagcagactcccaaaaatcgtttaacgaggcagtagctaaaaaagatgcttggctgaataagattaatcagaccaacctaagtttggatatactcttatccaaaaatataatgaacgggctaaagaagataattgagaaatataatattcaggtgctcactatgataaacagttctgctaatgaaatccagaccttgctaagaacacaggtggaagcccttactgtgctaagtcccaaagcagtttatgtttatatttctactaatcaaagaattgatttttaaatggtattatgctggataaattttataatgaaacactacataaactggaaacggctatcaacgaattggagattgaagcagataattgctcgatacaacgagttgaagccataattcaacttattatccaaaccctgtccaaattaaaggagtatgttttaaaacgagggtttaaaaatactgatgaggaaatccattttttcaaacatcagaaacctgtcattgtttcaaagctgatttattacaatgctatctataaaatagaaagcaaaaagccttatggtgcaaagcagataaagaaatttcttaacaaagaattgaaaaaactcaaaaaattctttgacaacaatattgacttttacaagtattaccgtagtggcaattcttttcttgatgaaaatttctttattcgtggaaaacacgatataaggatgtggttggatacgttttattttgaggcagactaccgtttttgcacttctcacgattataaggtcgccaaaataattgccaatgacctgatacaagtttatcttgaagaccagctaaatagcaatcataaaaaggtatctgatagttcttcactccattggacaggaagtaaaacggcattgaccgagttgatttatgcactctacgcacaaggcgtattcaacaacggaaataccgatataaaattgattgccaaaacatttgaaactgcctttaatattgatttgggcgatttctatcatacatttatggaattgaaagcccgaaaaataaaccgtaccaaattcctcgacagcctgtgtgaagctctgataaagaaaaaggacgaacaagacgagaggtaatattttataatacccctcgtggcagatgaacgccttttgtccgaataatactttctgaaatctttggtgtttcttgctttttttcggcttgttccgcaggttcctgtttttgttccggttcaatggatagctgtatcttacggtcaatagccgccaattccgttttgagttcgctcaatcggttttcctttgaccacgtaccattgacaaccccctgaagtatcggaatatccttttggaactcggcaatattgtcctgttcttttttaatatacgacggtagtttttccaatgcccttaaaaaatttaaagaggcggtttcagggtctttagcaattacaccaaaattgtggttgtatttaatgttaccctctccctgtatgaaaaatcggtttacccgtatatccgcgccgtctttttccgacatttctgtcttaacgataagctgaaacccgtacaagttgccaatttcctgataatctccacctgtacgggctttttctgcaatttcattgagctttgtaccgatttgttttgcattagcgttgggcgataaaccgtccaactgaacagggtttaaaattctgccgtcctgccgtttttgtatgcgttgctgtaaattatcccaatcggttgtcattcggttcaggcgggattgagctgcgttaaattcttccgtatagttttccaatttggatttagcactatacttggaacggttaaacgcttgcttctcgctttccaatccagcaatctgtttttcaaccctcgctttatccagcaggtcagtatttcccgacaggattgccacatattccgaaaagttcattcctgatttttcgtccatactgccctcatcaatggtacgtttaccgagattattggactttaattggtcgataaaaagctgtttgttaaacagcaggttgaacttatagctatccagcgatttttcaacggcgtagataatgacatctactttgttgttgttaaagtgcttggcaatttcattgcccttgcggactgcccgaccgtcacgctgggcaaggtcggacggtcgccacggcgtatctaaatgatgaacggcaacagctcttttctgtgcgtttacgcctgttccgagcatactcgttgagccgaacagcacacggattgtaccgtcgttcattcccttgataagtgccttacgttgcttgtctgttttggcttcctgaataaaccggatttcattcgcagggatattgtggtcttccacgagcttacgtttgatttcggagtacacattccattcattcggtttgtaagtgcctaaatccgagaaaacgaattgcgttcctttctgtgcgttgaatttgttgtaatatttcgcaatattattggcacagtgagaggctttgttatcagggtggtcttcgtagataccgcttaccattcgcatatccaaagacatcttacgggcatagtccgtagcgatgagcatctttgctttttcctctgattttgatagcggtgctctgccgagtaattcccctttgcctgttttggcaaactccattaggttttgaataaactcctcttggtctggcgtaggcggaatgttatacaggatttcgtttttttcaggtcggtcaatgcctatatcctttgcagtacggtagtccgtgatttccgaatagaattgagccaattccggtactttgatgaagtaacggaaacgctcttttgccacgatattattagccaccgaaaattcgtaatcggtcgtctttcttgcgtagatagccgcccaagcatcaaaacagttgataccctgtttttccaatgctcttgggcgtagatacttaaacagcaggtacagctccgttaaggagttgcttatcgttgttcccgaaagaaaggttgcccccatatccgcatcaatacgctcctgaatggtacggatagcaaaaagcaggtttaacgctttttggctaccgtccacgttgcccaatccggcaacccggctatgacgggtattgaacattagatttttaaattggtggctttcgtcgataaataaatggtctatgcccatcatcttaaaatcgacaatatcatctttgcggttctcaatatcgtgctgtaacgtttttagtttgacttcaagattgtctttccgtttgatagctccggcaagcataccccttgttacttccgcaccgtctgcctccattgcatagaggtttcgctctacgttatccaattctatttcgaggatttccttttggatttcgggcgattggggtatcattccgaattggtcgtgtgtcaatatcacgcaatcccaatcattatttttaatatctccgaaaatccgcaggcgtttttggggtgtgaaatcttctttgcccggaaacaatatttttgcgtgtgggtaggctgtccggtaggcttcggcgatttcgtgaacattactttttaacccgataatcattggcttgtgagccaatcccaaacgcttcatttcctgtgcagcggtacacataaccaacgtttttcctgcacctacttcgtggtcgcagatagcaccgttgttcagcttaatcatccaaacggtgtccttttggctgtcgtacaggtcttcgatgcctaacgctttgcggtctaatcccgcaaagtcctgatgtgttccgtcatagtttgggcggacgaaacagttaaacgtatcgttatattggtcggtcagtcgggttttaaattcatcggattgtgcaaatagccaatcggtaaaagcggtacggatttcgtcaattttggtattagctatttgtatagcctccatatccttgaccttgacttcctgcccgtctatttctactttcttggttatatcaggtgttgtattgacaagagcgtgcttcatcaaagccacgccgtcaaacgtccggctttcagccttgaccgcatattttacccaaatgttttggtttccctgattacagatgacggaaaaatcatcggagctgtccgaatagtggatttttacatcggcatcaaacaggtgcgaggcaaatttggcataaacgcctgtgggtatccagcgttcgccgaggttgaagtccagctcctcaaattcgatacgtcttggtcgggcttcctctaataccgtaaggctttgtttagcttccttatcttcggggttttgttcaacgtaggctctgatttcttgtgctttttcaactacgttaccagctatccagcgttcggctatttcgtactccctttccaacggattatagaaaatacgaccgtgtaaatgctctttcagggcatcggtggtcatattgctgatttcggacatatagtccaagtccacacttccgtatttgttcagcgaggaggctaatgcttcctgtggattatcggttgctatggttgcggtagaaaaacttacaggacggctgaatatatccgatttgtgtaccacaccaccaacgacacgctccaaatagggcatttctttacctgcactatccgttttgatgagcttgatattgtctgcactgttgaggtttccgtactttttgacgaacgcattgtaaagaagattaagggtttccctttcttctttatgttcggtctgaagttcagcttctttgatatagagctgttggtaaacattacgcaccccgatatacgcttcggctcttgctttttgtaaggacggtagttgcaaggcgtggaaaacagccgtaccgtttgcggtatctacctcttgtagatgaccgacccagccgttgtctatgacaagacagtcgttacggtggaacggttgcagctcgccactgtacgcagcaggttcgggaatggtgttgacgacgaggttgggaacggctggcttatcagattgatcattcccaaccaaatccgaaaacaagtcgccgatagtttcctgttttttaccttttatttgtggtgtgccattagtagttccgttagactttggcggtgtataaggctgttgcatagcacccctgaacaggtcagtttggcgacctattgaacggttgctttttttagtgctttgccttttggttgttgtcgttcttttggatagagcaatcaccattacaggttcattcgcattttcaaacaggtcaaaaatgcttagttgttttagttcctgtgggctttcctgatggactaccggagtggttataagctgcggtttttgctgaacgattgcagggtctatgaccggaggtgtaacctttggttcaatcggaatttgtatcataggctcatcattgcgttcacctttgtataagttcaagtctaaatggtttccaaaatcttcggaaagcatttgcttcaaatctttggcaatgccagcaacgccgtctttatgtgaataaatgattgcaggttgcccgtatgggtcggtatctaatttttggtcggtatggataattcttgtaccgtcctgaaagagcgcattgcccggcgtattgtattcggttggcttgctttggcaaaacagatcttccctgtcggtcagattttgttttgccgtatttttttgcaggataatcaggtcgctgcccacttccgtacctgcatattcggtaaacagattgttgggcagtcttacaaccgaaaccaaattattatcctgcatcaacgccctgcgtatgggttcgttcttagggctattcagaatgccctgcgaagtgatgtaagccaacaaaccaccctcacggagcatatcagcacctttcagaaaaaagtaattgtgtatgcttcgggcagcctgtactttggcatcgtccctgcttcgggaaaaggacaaatcaaatacggaagtatcgccgaacgggatgttactggcgattacatcatagctgttttgttccctttcggggatttcctcaaaaccgtttatacggatattactttcggggtaaagctgctttaaaatcttgcctgtaagcaagtccttttcataagcggtaacactggctttctgattttccgaaaaggattgtatgaatgaacctatacctgcggagggttcgaggaatttatcaatgtgcagaccattatcccgcaaggcagatgaaatggcatctataacctttggcggtgtataaaaagccgtcagtacggaacttttcatactgtccacatacctgcggtattgcttatcgtcttgggaattttctttgaggagttggtggagttcctgcgtgagtggaaagaggtcgtgttctgtttttctccaatgattgatatctattttgttttctatggggttcagaacgaatttaagaccgccaaatccgctgtatcgcatcattagcagtctttcgcctacggtggcttgccgtttctccttttccagtttaaaaacaattcgcagggcatcaatattctgttggagatggaaccgtttactgaagcccattttcctcaatccatattgagatggttccagtcagttcggtgtagagtacatcaaactcatacccataggcgaaatcatcggttaatttgtatcctgcgaaaacaggctcacatacagggaacattttcagggcgaacagtcgcagttcctcgtctgccattatggtatcaaactcattgcataccactttgaaaaccgtgtcgaacttggagaagtgcaagccctcaaaaagtatgtagttggctatttcgttgcattgcgcaacggcgtttcccgaacggaaagcaccctcataagcattggcagcccacgaagaccgttgctcaataaatttttggtcgtgtgccttttcggggaagctgctgtttaataattcttgcagtcgtaatctgaaatacgacaggtctttttgctgtacatccatacttgttttgtttagaattttacttaaatcctaaaattatagtagtagataatcgctttgaataagtggcagggtttggcgtttagaggtagtgttttgctatttgtggtggataattgaaatgagatttgtaaagaatttgatatagggatataaaattttctcaaattatttttgtggcttaaaacatttatcgtaatattgcgatgtataattatagataagatgggcttaacaaaaacagaaatatttacagaacaccaaaacagcttagcaacctctttaaaggcattggctcatcctgcccgtatagctatcctgcaatacatcatcaaacagaatgcttgcatttgtaatgacttagttgaggaattaggattggcacaggctacgatttcacaacatttaaaggagcttaaaaacattggtatcatcaaaggcaatatagagggaacaagtgtgtgctattgtattgatgaaaatatttggcagcagattaaaaaggaaatcaacactttctttatagataatgtaggggttgataaatgctgttaagcattttttttgaacatattaatcgtaataaagcaatataacaattaaataaaaaacaatgaaactatcaaaaatcaaagaaatcttaccagcattggataatgttgaatttcaattagagaacggaacatttgtaccggaacacttccacgttacagaaataggcgttattaccaaacactttattgattgtggcggaacgattagaaatgaaaaagttgtgaatttccaattatggaatgctaacgattttgaacacaggctaaagccaaccaaactattaaacatcatcaaactatccgaagaaaaattaggtattgaggatgccgaaatagaagtagaataccaaagcgaaacagttggtaaatacgacttggattttaacggaaaccattttgtattaaagaacaaacaaaccgcttgcctggcgagtgatgcctgcggcattcctgcggaaaaacaaaaagtaaacttggcagaattaaaagatgcttgctgtacgcctaattcgggatgttgttaacctaaactatcatataaaaaatcaataaaatgaaaattgcattattcagcgacattcacgccaatctacctgcattagaagcattctttgaagatgtagaaaaaagaaaccccgacagtatttattgcttaggcgatttggtaggatataacatttgggcaaacgaagtagtgaacgaaatccgtaaaaggaaaataccaaccattgcaggaaattatgattttggcatcggacgtatgagcaatgattgcggatgtgcgtataaaactgaacccgaaaaaggcaacggcagcgtatctatttcctttaccaactctattatgaaagatgaggaaagagcctatttgcgtacacttccggcacatatcaaagtagaatttcagttgaacgaggataagctcaatttgctattggtacacggtagcccaagaaaaataaacgaatacttatttgaggacagggaagaaaaaagtatgcttagaattatggaacaggcggacgcagacattatgtgtttcggacatacacacaagccataccaccgcattttaaattcgggcattgacggacaagaccatttcagacacgccatcaatataggttcggtaggaaagccgaaagacagcgatgtaagaggcggttatgtaatgcttactatcaatgagcaaagttctgtattggacaaagacagtatcagtgtggaatttatacgatttgattatgatattgaaagagccgcaaaagcagtagaggaaagcattttaccaaacgaatacgcagagaatttaaggagaggttactaatcaaagaatttataaagatggaatttccaaccgatagaaagtattcaaaagaacatacgtggataagcgtacaggacaacacaggtacaataggcattaccgaatttgcacaaagcgaattaggcgaaatcgtatatgcagatttacccaatgttggatatagttttcggcaggacgaagtattcggctctgttgaagcggttaaaacggtcagtgatttatttatgcctgtatcgggtaaaatcgttgaaacgaacgaactgctattgaaagtgcccacactcataaatgacaatccttataaagacggttggcttattaaaatagaaatacaggacatcgcagaattagaaaacctgcttacctcaaatcaatataaagaactcacaaattaaccacgcaatgcaatcaaaactaaaattccttgaccgttacctaaccttatggatattccttgcaatggcattaggcataggattgggatatttttttccggatatatcaaaaattacaaatgctctatccgtaggcactacaaatgttccgttggcaataggtttaatattgatgatgtacccaccattggcaaaggttgattattcattattacctatggcatttaaggacaaaaaagtaatcggtatatccttattgctgaactgggttatcggcacagtactgatgttcggtttagcagttttgtttttacggaacgaacccgattatatgacaggcctaatattgataggtttggcaaggtgcatcgcaatggtaatcgtttggagtgacttagctaaagcaaacagagaatatacagctatgttagttgcattaaatagtatcttccagatactttcttatagcttcttagtttggttattcatcaatgtattacctgaaaaattaggaatagccaatttcaatgtaagcgtatcaatgaaagacgtaaccgaaagcgtattgatatacttaggcattcctttcttagcaggttttataagccgttacgcaatggtaaaatcaaaaggtatagaatggtataacaggaaatttgtaccccgaatatcgcctattacattatatgctttactttttactatagtattaatgttcagtctgaaaggagataaaatattagaactgccaatggatgtggtaaaagtagctataccgttaatcatctattttgtactgatgtttttcgtcagcttctttatcaacaaatcccttaaagttccttacgacaaaaacgcctcaatcgcatttacagccacaggaaacaactttgaattggcaatagcggtagcaatagccgttttcggtattcattccccacaagcgtttgtaggcgttataggaccgttggtagaagttccggtactaattctattagtacgtgcaagtttatggttaaagaagaagtattacagttagaaacaagcaaaagttatgaaatggcaatatgatttcaacagatgtacaaaaaatataaggttcaataattaaaataatatcgcgaaaatgataaaactaataaagaccatacctgcatttcctgttcgggatattgaaaaagcagttgccttttataaagcccgattgggctttgattgcagacatatggaagaaacctttgcaatattaattaggaatggtatagacttacatttatgggcttcctgtaattatagctggaaatggaaaagtatttttttatttctcaaaccgattagtagcggagcggaaagttttttggcaggtacacacagttgccggattgaaataaaaggcattgacgaactgtataaagaactaaaagaaaaggaagtattacacaatgaaaaaaccgaaatagaaaccacttactacgacacaagagaatttgcaactttggacttatacggaaatttactaaccttttacgaaaatatacagtaggaacaaacagttcaaccaagccggttttaactttttgtattttagtaattgcttaaataagcaaattaactatatttgcaacatggatagtacttcttgtataagacaacaggcggacattaaacaaatcaatcgctgtaaagaacgagtttcagaacttcacggttcgtttgactatttgtcgaatggacttgaattggcgggaaacaatgtaagactgaaaatcctgtttctgatttatgaagaaaaacgactatgtgtttgtgatttaagcgatattctcggtatgacaatttctgcaatttctcaacatttacgaaagctcaaagaccgtagactaattgaaacggaaagaaaagcacaaactattttttattcattgacaaaagagtatgaaaaaatgttgaccccattttttgaaatacttgatgataataaaattttataaactatatgaaaacggacaacaaactaatcggcactggactttttacagcaattgctgcgtcattatgttgcattacgcctgttttagctctaatagcagggacaagcgggattgcttcaaccttttcttggctcgaacctttccgaccatattttattggcttgacaattttagtgcttggttttgcttggtttcaaaagttgaaacccaaaaagcaaattgactgtgaatgtgaaataaatgaaaaaccgaattttatgcaaacaaaatcatttttaggagttattactgttatggcggctttacttttgtcatttcccctttatgcccacatcttttttccaaagaccgaaagtaaagcaattattacccaaacttccaaaatccagaaagttgagtttacaatcaaagggatgacttgttcaggttgtgaacatcatattaaaacagagattagcaaactaaaaggaattatcgaagttgtcgtttcctatgagaaaggcaacgctattgttaagtttgacaacaagcaaacaagtattgccgaaatcgaaaaagctatcaattcgacaggttataaatcactaaaaagtaaagttatatcataatggaaattaaattaaaatcaataataacttgcccaaactgtggacacaaaaaagaggaaacaatgccaacagatgcttgccagtatttttatgaatgtgaaaattgcaaaacaagattaaaaccattacagggggattgttgtgtgtattgcagttatggtactgtaaaatgcccgccaatacaagcaggaaatagctgttgtaaataagagaagcttaataatttactttagaaagctacttgtctaaatttgtgagtataacctatttagcgaaaaacctccgaattatcagaggttttttattcattatttaagatttggagcatcctgccgacttcaatatccattcttgaaaacgcaaaccattttttgccctggtctttgagtgatgctcctatatggtagagttctgcattatcaataatcaaaaatcggtcgtgggcatcggagaaaacctcaatagttactggaggatattggctattgtagcgttgtaagtctaaccgtaactgattgctgatgcttttggtaaggattgtagcggttacattgtttttacgcttacccagtaaaataagcaccgtatcatccacgtaattatcaagcaggataattgagcttacggcacttcggataatatcggaaacaaaggtgtaggcatcaaatacctgcccgttgtagaaaatgcctttttcgctgtgcagcttgtcgctttccaaagccttaaaaatctcttcaaatttttggtcggcttccagttgctttaattcgatattatccaaacgatgaaacaaagaagcgttgctaatgagcatacgccgcatttctacaaaggcttccattatttccacactcattttaacggctatatctgaacggagtatggcagatgccattgcaacgccttgttcggtaaaaacatagggcaaataacgtctgccgccgtaatttaaacttgaggttccaatttggaacctcaagttttcaacttcctcttcggtcagttgaaagcagaatgatacaggaaaacgctcaatatttctttttacggctttgttcaggttctttgtttccacctgatataaggcggcgaggtcgctatccaacattacctgtttgccccgaatggtataaatcaggttcctgatttttttgggtacgattgacggtttattttccattgcgtttactgcttttgattactgcggattttaaattatcaggaacaatcgctgccggtgtgccttcaaaaaagcggatggcattttctacagaacgtacaaaatcttccttctgctggctcatagaggcttcagcatacgtgtactggctcgctcccagaatagctacaaaaaactgaacttctttaagctccccgctttccttatctataatggagagcgtttttcctgcataatcgacatacatcttatctccggatttgtgattcatatgcattaccgggttcacacgcttgccccagatcttgtaatgatgccggaactgtgaactctgaaaaccatcaggatgcagtacaagatactgttcccacatatgatgtatagtgactcctacctttttaagctcacgttccatcttgggaaaaaaatcatacagggactgtagtttggagctaatgggctgaaccgtgttatgggaaaacaaaagttccagctcggcgtccgtcttctcattgatcgtatcaaggcttaaacccaagatctcatataaggaaatatatttttttacggtatttctggaaagcgataaatagttgcttataaataacttgctctttccactattgtagaattttatgacttttctaattttactcatgtctgttattttatttgccataatccgcttttttttaacgaatgtatgacgctaacatcatgaaaaaatcaagtcgctcttatctcaaatataacccagataacaggtggtcattttgaaccggaaagtggtggtcaatttgctccgaaatcagtggtcaatttactccgaaattaggtggtcaatttgaccgttttttccagttctttccttttattcatttttatcgtaaaattcaatttcaatctgccatttccgtgagtaattaaaattactgtttgcggcgaataagtttaatacattaacatcaagtcctccgtcaagatttactgtttccacaaatttttcgagaataagattcccgtttattcgtcctttaattgtagtcataatgtttgggaagtcatggataaacttactttctttcattgctctttccggatcaaaggttcctttaccaaattttttctctctcagaatttcttttttttgcgaaaaatttgcttgtacggcaatttttgattttttccccccaacatcagatttgttttcaataatctcctctataatgattttctttgcacctaatgcttcatatgccctaagagcttcttcaagtatcatattcttaataagttcacctgaatttttgagaggaattagaattgtctcatcttttggatgtttgcagtacagcccaaaactaaagatgccgtccttgctcccaaaatgcgtgtagatttccgcatcttttctttcaatcatggtaagtctggaacctccgcgtgattgtaaaatattttccagaattttctttgacccaaattcttcgaacagtccatggaaaatttggcttttctgatttggtttcgaatacagaaaatctgtttcaaatacaatttttgactctcccgcttcaaactcattaatatttaccactgaatactctctattttcaggccttagaagtagctcatatgcatcatcaaaaaaagtatcttttttaaaattgctttttaaattctttataaaatccttgctgtcagtataccattttttataatagttggatgtgtcttcaaaatttgctagtctcgcagtataaattccctttgcgtagttgtcattgatcttatctacaattgcgatgtactccatggttggaattattttttttatgttttcaaaaatacgaaataacagctctatttagggatttatgagcttctaatttctaatatcgttcgataatctttcacaatttattttagagttagaccaactagtttttttagttttactagattgaaaaattgcaacaacatcacttacaaccggtttgtaatatacaggaatgaatatggcttttattattggattatgttgttctctgcaatttaatttgacttatttcgtgtaaattaaaaattagtatatatattaaatggcaagtaatactaaaatttttaattcttatggatttagctaaatgtaatctgaaaattgtttatatatatatacaaaaacacaaaatatgatagcacaaaaaatttacaactacttatcagtaattataattctagcacttttggcttggatatttactttgtatgtagaaattaatgaaacgaacgaggtattagaacagtgttctgatcgttattatgaagtaatagataaataagatttattacataactaagtgtgttcttgcaagtattctagtatttctgtatctgaaatattgtcaaattccttgctaaaatcagtcatggaaaaccccatcccttcaactatactaattagggttactgccttgggagatgtatgaccatttagagtgtcattaattgtagctttccgtaataaagcatttgaagcaaccccatgataactgtacacaatcttattacccttgatttctttttgaagttttttaccattctccaaaagcttttttaaggatagaataatcttaatcttgtaaatagtttcttcagtaatcacaagtgcaattaacaaattcaaaaaaaaatatcgttacgctataccgtaccgatattttttgtatatttgaaattatagttaacaaataaaatatgttaactttgcgatacttcaacgaataatagaagctattgcttagaatctctaactgaaaactggtaatttttaacatacgagatgataagctggaagctcacgacctaggcgtgggctctcttatctgtatgtaaggtataccagtgcctcagttaggataatgtagagttccatgccattttaggtttccatgcagtccgctcatttctacgttttgttcttagcttgctttaaaatatagtatcatgacactatacaatgggagggtacggcctgttgcggctttttaagcttatttggacacattttcattcatattaatttagtgctttccggtgccttgaggtgggctggagggatagccttttgctttttttgccgaggggcacttggggagttttgttttcaaagacatgaattcggtagtgatattaatataaaatacaagaacgtataaaaatgaaacagaaattctctttgattgaatattagatattaaaataatattataaaagaagaactctttctgcgcttcgtagagtggaatttacagttgcagaaagagtttcaataataatcaaggagtttaataaaattaaaacccatacaaaactatgaaaaaatcctattctaacataggaagcatgagtcttgtctttatgctaaccattgtttgtggttcggctagggctcagacaaagatgattagcggtaaggttgccgcagaaaatttacctttatccggtgtgatcgtatcacagcagggcagtgatcagagttcggttactaatgaaagtggtgtttaccatcttagtatttcaggggataatcctttgattgtttttaggcatcctgattatgcagagcaagttgttgcagtgaataaacggagtgtagtggatgttgtctttaagcagaaagtgaaaggtattgaggaagttgttcttaatgctggttattataaggttaaggatagagagagaacgggaagtatttctaagattggttctgcggatattgaaaatcagcctgtgactaatgttctttcggctgcgcagggtagaatggctggggtgtctattactcagaattctggaactgctggtggtggatttgatattcagatcaggggtaggaattcattgcgtacacggtctaattctgagattgatgggaatcagccgttttatattgtggatggggtgcctgtaggaggtggcgtgaattcacggtatggaggaacggtgctggcattggcgaatgtgaatcctctgaacagtattaatcctaatgatattgagagttttgagatactgaaggatgcggatgctacggctatttatggttcgcgtggtgcgaatggggtggtgttgattacgactaagaaatccaaaaaggggaatctcaggctgactttgaattcttcctatggtttgagccgtgcggtatcgggattggagatgatgaatacggagcagtatattgcgatgcgtaaacaggcttttgcaaatgataacatttcttcttatcctgccaatgcgtatgatgtgaacggaacttgggatcagggacgttatacggattggagaaaggagttgatcggcagttatgctacgctttcaaattcgcagctttctttgagtggtgggagtgatacgacttctttcctggtgagcttgggtcataatgaacagactacggtatttggtgaggactttaagtacaggacgaataccatatcttccaacatcgctcaccgttctcaggacaggaagttcagtctgaatatgtcgaatttgttttctgcattggataataatgtcctgacttcggatatcaccaatacttcgtatttgcttcctccaaatgcaccgtcattgtttgattcttcggggaatctgaattgggagaataatacgtttaataatcctttggcaacttaccggaatacttataccaatgatcagctgcagtttttgaataatatcactagcgagtatgaggtggtgaagaaccttaagctaaggttgaatggaggattgacctatcagacttttgaggaatggtcgcttcgtccgcatacggctaataatccttcatcggggatgacgtcggctcagtctgcggcttccaagagtaatcagaaccgtttttcgatggtggtagaaccgcagattaattattcttttaagacagggaagcattcggttgatgttcttgttggtggaacatatcagagggatacgaatacgaatgcagcgattcaggggtttggttttgagagcaatgtgtttatcaataatattggtgctgctcagacgaaggtggtgtctgatgatgtgaagactgaataccgctatgctgctttgttcggtagggttaattatcagtatgacggtaagtacattttgaacttcacagggcgtagggatggaagcagcaggtttggaccgaacaataagtttgcaacatttggtgctgtgggtgctgcgtggctgttttcaaaggaggaatttttgaaggagagttcatggttgagttttggaaagcttcgagggagttatggatcttcgggaagtgataatataggagagaaccaatacctcaacacgtatgtgacctcaacattgatttataatggtgtggtggggttgattccatcgaggttgtataatcctgatttcagttgggagaagaccttgaagtttgagactgcacttgaacttggtctgtttaggaacaggttgaatgtgacggctgcgtattatgataacaggtcttccagtcagctgttgggttatcaactttcggcagtgacagggtttacttctgtgttggcgaaccttggggcaacggttcagaataagggctgggagtttgagttgaagggggatttggtgagggggtctgctgattctttttcgtgggatgcgggattcaatataagctttccgagaaataaactgttgtcttttcctgggctggaaggatcttcctatgccaacacgtatgtggtgggccagcctgtaaatattataaagctgtatcagcttaatggtattaatccttctactgggcagtatgcttttacggattttaatggtgacggtaagattgcttcgcctgatgaccgtcaggtgatcaggaacctgggacagaagttttatgggggtctgacgaatgattttaaatatgggaattggaatctgtctgtgctgttgcagtttgtgaagcaggagagcaggaattataacagtctgatggcttcgccgggactgatgaataatcttcctgtggaagcgctgaatgtatggtcacctgagaatccaaatggtttttatatgccatatcatgcagcacctacggcttcgcatcagctgtttcaggtgagtgatgcgacggtgtctgatgcttcttttgtcaggcttaaaaatgttcagctggcttacagtattcctcttcaggggaaggtgttccgggaagtgaagctttattttcagggacagaacttgtatacgtggacgaaatacttcggggttgatcctgagtttagttcggtgggttttctgccgcctttgaggacgtattctttcggtgcaacattgtcactgtaatcttaaaatcctttttaaccttaatagaaaaaaataatgaaattattgatttatatattgaccttggcaggagcgttatgtctgataacggcttgtgtttcctgtgagaagatgattgaaactgaccttccccagaatcagatcgataccgaggatgtgtttaatgatgtgcagactgccaatgcagcgttgtctgcattgtatgcagggctttgggatagttcaccgatatcaggggatcagtcgggacggttgtttggaatgtatactgatgacctcacgtatcatacgacggcaaccaataatggttttcctgagatttttaacaatacgctgattgattcaagtattcctgtgaactcattctggacggcagcctatcagaagatttattatgcgaacagtattttggaaggtgttgagaattcagccgcaattgctgagaaggataagggtcggattaaagctgaagctttaaccatccgttctcttttgtttttttatctgcagcagatatatggtgatattccgtatcctgtaacgaccaactattcgatcaatcagacgatttcaaagacggcttctgatgaggtgctggatcgtctggagatggatctgtcggaggctgtcttagcgcttaatgattcctataggaatgctgaacgaatttttgtcaacaagaaaactgctgagctgattcttgccaaagtgtatatgcaccgtaaaaaatatatgcatgcagaggttttgctgaaggatattctccaaagtccgctgtatacttttcagaacgatattacgaaggtttttcaaaagtcaggaacacatattctttggcagttaaagcctaagaattcaggggatgccacgaaggaggcatcgatctattattttgtgaatgctgcaccgactgctttttcactgacgtcttccttggttggaagttttccgacgggagacctgagaaaacagcactggatgtctgctgtgacggttggtgggaatacctggtacagggctgaaaaatataagctccgttctgccaatactttggagtattctgttgtgttcaggttggaggaagtgtatcttcttcttgctgaatcgttggcgcagcagaacaatgtggctgatgctataccttttgtgaataaaacaagacaaagggcgggtcttccgacattgagttccggaatcgggaaggatttgcttttaacggagattctgaatgagaacagaagggaattttttacggagatggggcaccgttttctggatttgaaaaggaataatcgtttgagtgtgcttacagctaccaagccgaactggaaagagtttcacagggtatggccggttccgcagaaggaactgctgcttaatgcaaaccttaatcctcaaaataccgggtactgatgatgaatagactgaagtttaagcgtgctttgagtaaagtatcgttgatgatgatattttgtactatatccttctttagtgcgcaagatatgtcggatgaggggctcaggaaatgggtagcgcagttttcttctttgaatctgctgacggtcaatgaggatgcttcttatgctgcggtcacaaaatcttatatggagagtattgatacagtgcttgttttttctcataatagggtaaaagctatagatactcttgtgggttacaatatatcacggaattttttaggcaagaattatttatttgctcatggtgttggcaaagctgtttttgtcaatctgaaaaccgggaaaagatttgactataataccgctgttaatggcggtattattaaagatttaaaacagttttatattgtggatagtcagaggaagatgcgggtttttcattctgatgggcgtctcttgtatgagattgacaatgttgataaactggtgggagataatcggaaggttatgttttcagttaaatcggaggaaggtagttctgctttgatgagatgggatggtaaaaaggctgtggttttgtatcaaacagataattctattgagaagattatattaatgccttctgggaagtttttgagtattcgtgaaattggacaagggacttccttgagatcgctgaagattttggattgtcagagcggaagattgattgcacctgcagagttgcagaatcttcctgagaaaaccgtgaaggtcactgaagttcagaatggagaatcttttttgattagtgctgaaacacatattccggttccggcaactccaatggttgaactttggtacggaacggacagggagcttcggtttacaaaaaatggtaaggttaaatatcggttctggcatcttatgaatgattctggaactgttgatgagcttcccacggatagatttgaaatctttacttcactgaataacagccgatacttgtgggcattcagtaacaaagaagtttttgattatgtgaatgttaatccgaagtatgatatgttcttgtatgatactcaattgaaaaaatattcgctgatatttccgaagtcctctgaaatattcggttcagcggatgggaggtattcggtatcttttgacagaaaagagaaaatatggaaattgtttgatcttcacagtcagaagatgagcgatgttaaaggtccagatttgagaaatcctgtttatagtttggatggcaaaaaactgttttttagcggaaagacagatttgtattcttatgacctgaaaacgggtgttttgagtggtatggagatttcaaaagaatcggaggttgttttgatggataagaaggtaattatgggatttactcttttggagacgaagttcaatacagttacggtagacacgggtaaacctttgcgtttgcagttatacaatacgcttaaaggtacaacatcagtattggagttgaatggaaataagagattggttcttattcctgaaactgataggaagattaagaaaattgcttttggaaagggtagtggtaaaaaggctggttttacgattgaggagaattttaatctgcctgatggattgtattcaatttcacataatgggagtaagaagaagttactttatcagaccaataatcaggatgttatggtggataagatgaaagtagaagtggtgcattttaataattctttgggggtaccgttaaaaggaatattgacttatcctgtggattatgatcctaagaaaaaatatccgatggttgtaaaggtttatcagcagcaatccagtgctgcttcaacttatctaaatggtgatgtagcacaagatggaattagcaaaaggattttggttgaacatggttattttgtatttcagccggatattgtgtttgatgacagaggaacggggatttctgctttggattgtgtgaataaagccttggatgcaattcaggatcataccactattgatttttctaaagtaggattgacggggcattcgatgggaggttatgagaccaattttattgctacgaaatctaagcgttttgcagcttttgtttcaggtgcttctgttgcaaatacagttcaaagctatttttcttacaacaggctgtttgaagttcctgattatgcaaggtttgaagatgggcaatttgatatgaatatttcttatgccgaaaacccaaagcattatgataataataatccgataaattttgtacaaaatgtaaatgcaccaatgcttctttggactggtataaaagacacgaatgtggttcctgagcagacggaagctttttacgtgggcttgttacgaaacaggaagcctgttattgcattacattacaaagatcagtcacacagcttgggaattatgacacctgaaacttttgatctgaatcgaagggttttggaatggtgggattattttcttaaaggcaagaacagtacaggttggatacaacaggagttgattggacactaaaaattgatactcaaaagaacgttttaaagcgttctttttttgtgattatatagctgtggtaaactgatgatgtgagtatagcaattatcaaaagtatttaaaaattatctttgcatatcatcttgagtttggttttgtatcatatttaagtataacttgaaaaaaaataaaaattaataaaatgaaactaaaaataaaaagacctttaaccgtgtattttagatttgttctcatgttgctttcattttctctaccatttatttttaccaatgcagcatacgaaaatatgatttcaaaaggtcattatttctggtttgtctattttattgtaattttccttttaatgatttattttttggtgaaaaccaattattacgaactgatcaatgcaaagatttacgatgaaaaattactctattacaatttattatttttaaaaagggaaatcaaattaaaggaaataaaaggttataaaaatggagtggacgacagttcacgtgaattcattacaatattcgataatcgaaacagaaaaattgcaactttaaaagagaacttgtattcaaatctccctgagtttctagagactctaaattgtgaacggattggatacgagaatacagcatttcaaaaaatgattttaaggattaaatctttttttcaatgattgtaaaacctttaaacggcgttgtaatgctttcactaatgagtaaatagatgactgttaaaatattttgtaataaaatgcagcagataaaaaacaaatagttaataatgaattacaaagaaaaaataaaggagttactaaaagaaggctgtagtgcgaatgaaatatctgagcatctgaaaaagaataaatttgagacctgtagcattagttcggtaaataattatattgcgaaattaaaaatagagtacaatgcaaaaacacgatttgaactttcagtattactgatgcgatagtttccaaacatattttgaatttgaacgacaagatttaaaatcaatggaaaaaaatatcgttttctaaatagtcttcagaaaaaattctccttcgaagaaaaaattttttaattttcagcaactttcagtacttacaaaataaatatggaatttatggtaaaaactaagatcagaacaacactaaaaaaagggattacaatcccgagccttatttttataatcggagtttgtcttatttctgcattgtatcctgaaattacagatagtcttctgacagtagtcaaaggttttatttttgtgaacctgaactggatttatgtttgggcagttacgatttttgtaattttcctcgtgtatatcatgaccagtaaatacggtaatatcagattagggagaaatgacagcagacctgattattcatttttttcatggctatcaatgctttttgctgcgggaatgggtattgggttaatgtattttagtgttgctgagccgatgcagcattattccaacgagatattttctgacaaatctcttgttcaaagggctcagaatgcccagctttacaccttttttcactgggggattcatgcttgggcaatctatggagttgtaggtttggcgctagcttatttttcgtacagatatagacttcctttgtctttgagaagttgcttttatcctttattgaaagacaaaataaaaggcagatggggtaatgtcatcgatgtttttgctttatgcagcactttttttggtattaccaccactttagggtttggtgttgtgcagatcaattcaggactggttacactgagtatattgcctgataacagttttctttatcaggttcttattgttgctgttttggtctcattggctatattttcagcggtcagcggtttggataaaggggtgagaatattaagcaacataaatattaccgctgtcgtaatactgcttctttttgtgctttttttaggtcctacggtttatctgatcggaagctttactgaaggtatcgggacgtatatcaatagttttttttcgctcacattcaatactcatgtctatgaagaaggaacccagacatggttttatgactggacgattctatattgggcatggtggatctcgtggtctccgtatgtaggattgtttatagcgagaatttcaaaaggacgtacaatcagggaatttgtagccgcagtgctgattttacctactttatttaattttatctggatgtctgtatttggcaacagtgcgatttggtttgatataaatgttgccgatggttttttaagccagatggctaacgatccggacggactgatgtttcagtttctggagtatcttccatttacaaaattcgttagttttcttgttattggtatcattattatcttctttgttacctctgctgacagtggtatttttgtgatgaacagcattgcaacgaaaaatgctagggtttcgccacggtggcaaacgataggatggggaacacttctcgctgttttggcactgatactgttgaatgctggaggattggctgcactccaaagtatgaccttgattacagcacttcctttctcaataatcatgcttctgttcctcgttagtctgacaaaaggtttaatggttgacaaaaattattatgacaaagatttttcatccacgaccgttccctggtcgggagagcagtggaaagataggctaaggcagatcgcttcctttaatgatgcagcttctacccatagatacatagaaacaacggctaagcaggcatttggtgagcttctgtctgagtttgcagttaatgggatagatgcaaaattgaattatgcagaaaaccctgaaagaatcgaaatagaaatcagatatgatctgataaacaattttatttatggcgttagaagcgaatcaaaaatagtgtctgaatacctgctgaatgaagacaatctacctgacgcagaagaaaatctcgtttatttccccaaatcttattttggtgacaacagggatggttatgacgtgaagctgttcacaaaaaacgaattaatatcggatgttttaaaacattatgaccgattcatcaatattatatcggaagagaaaaatacaatgtttatcagtagtgattcaaatcatcggtttaaataactggaatttttattaattggcattcgtattcataattaatacgctattctccttgagtcttttctgcagccagcttttaagttgcgcttgatcgatcttatcacctgtatacaatagggtaaactgtagtcttgcgctgtcagtcagtggatagagttcagtttttccgtagatgacgttctgcatcgatggatacaggattttaatttcttcgagaagagtggagtcggaaattttataactattaagctcttgtctgagttgtgcaatagtcaagtctttttcggaaatacttctgtccgttttgctgatttcacttaggatctcagatttgatatcggttccgtcttgtctaacattaatcttcgtatcgtgcagtccgtaatccgcaagaattttattatatgataaaatttcatctgcggttatcttttcgttgagaaaagcaatatcaataattttaggtgaggcgttataattaatttttttataaataacggtaaagcctttattttcaaattccttatgtacaaattcctctgcggtctttgtaaatgttttttcattaaaaagattgtaagctaaataaaagcttggaatgatcatcactaaaatcaatactgaaataccgtacttaattcttttctcatatttgttgtcaataatagatgaaggatattgaaggaatttaacaacaaaaaaagttgcaatgcagataaaaaaacaattaatactgtacagataaaatgctccaaaaaaataggaaaaattgaatgttgccaatccaaagccggcggtacacaacggtggcattaatgcagtcgctatcgccacacccgggatgggatttcctttctcgactctggtaattgctataactcccactaagccgccaaaaaaagctattaaaacatcgtagatgttaggagctgtccttgcaagcaactctgactgtacatctttgaaagggcttacataaaagtagatggcagaaaccgtcaagcttacaaatgttgcgatcagtaaatttttaaatgattttttcagcaacggaaaattgtaggtgcccaaagcaaaacctgctcctacgatgggtcccattaatggtgatatcaacatggctccgatgattaccgcagttgagtttacatttaatccgacagatgcgataataatggcacaggcaagaatccaaagattggatccacggaaagaaatgttggcagttacgttttcaagtactttgtcttttctttcttcaccattatgaagattgatgaaattaaaaatattattgatcatttgtgtctgtattatttatttgagaatttctgcttaaaattatgtatccgataattccacctataagggatgctgcgaaaataccaattttagcctgagtctgatactcttcatgagaaaatgcgagcgaggtgataaacaatgacatggtaaatccaattgatgccagaaagcctaacccgagaagatttttaaaggtcattccttcaggtactgtcgcaattttaagttttataaataagtagctgaatccaactactcctaaaacttttccagctaccagcccgagagctgtacctaaggcgatattattattaaacagactttcaaaatctatatttaacgatactcctgcgttggcaatcgcaaaaattggaatgatgagaaatgatactgcgggatgcatggcatgctcaagtctttgcaagggtggagtagcttccaatgttgcctcattcatcttttctaatacatgaagctgttcgttcgttaaggtaggagtattttcggtagggtcaatatttttaaacctttgcagatatacattgatttttgcgataaagatattttcttttattttaacatctgcaggaatagtgaaggcagcaagaaccgcagcgatcgttgcgtgaacccctgataaaagaaaagtagtccaaacaccgcaaattcccaaaacggcataaaataatatagagcggactcccaaacggtttcctatatacatgattgcaagaatcaataatcccacaatcaggtaaaccatattgatgtctgaagtgtagaagaatgcaataaccagtacagcacccaaatcatccacaatggcaagtgcagtcaaaaatactttcaaagcaagaggaattctgttgcctaataaatataaaactcctaaagcaaatgctatatctgttgccatgggtattccccatcctttatgaggttcgccggtaggattacaaagcaaatatatcagtgcaggcattaccattcctccaacagctgcaacaatcggaagaagcgcttttctaacatcagatagttcgccgccaataatttctcttttaagttcaagacctactacaaaaaagaagatggacatcaaaccatcgttaatccaatggtgaatattatactcgaaataagtttcattgttccagcggaatccaaaagattgttctaaaatttcatgataggaatgcgaaagcgatgtatttgctaagactaatgcaataacaacgctgataccaagcaataaccctcctgacttttcctgttgtatgaaacgttgcataggttgaacgattttgtcaataggttttttagcatagttattgtccatagaaaattatttgaccgcaaatttaagaaatctaagtaagaatagagttttactgtggtctaagtgaaaagtaaatttttgttcttgttctttaatccaaaatcttcttttttttaaaaataaatttttattattacatcattttaatcaaaccacttacagaatgtcatcaaaaaaacttggagaatggtctgcaactgccatctgcggaaatgatattacttcttcgtgcttatatgtttctgcgcttgctattgtagctgccggacagtacgcatggatagcccttttacttgtcgcagctgtcctttatttattccgtaaaatctatggtgaagtcgttggggcattacccttgaatggcggagcttataatgtattgcttaacacgacaactaaaagtaatgcttctattgcagcttgcctaacaatattatcatatatggctactgcagttatttcctccagcgaggcaatgcattaccttcatcacatttttcctcactttaatgttaatattgctacgtttttactgcttgtgttatttttgggattgacgattcagggaatttctgaaagcgcggtagttgctctgataatttttatttttcaccttacgacaatgatgcttttgattggatcatgtatttattttgtgagcaataatggattgtccatcttggtcaataattttcatcttccaactaaaaatggaagtattttaacagccatcttttttggattttcggcagcaatgctgggaatatctggttttgaaagttcttcaaattttgtggaagaacagaaaaggggtgtttttgcaaagacattgcgaaatatgtgggttgcggtttcaatccttaatccagtaatagcatttcttgtgatctgtattattccagtgtcggcagttgaatctcatcaaaattcatttttgagttacgtcggcacattaacaggagggaagtggctgtcgacaattatttccatcaatgcagtttccgtactcagcggtgctgttttgacttcgtttgtaggagttaatggcctaattaagagaatgactttagatcgaatacttccgaattattttttaaaggaaaataaaagaggaagtacatacagaattttaattttattttttctcctatgctgttctgttcttttggtcactcgcggggagttgggacctttagctgcagtttatgcattatcgtttctaacagtaatggcttcttttgcgatcggaaacatacttttaaaattacgccgttctagattgcctaggccagaaaatgctcgaccgggtgctgttattatagcactctttgcaataatgcttgcattatatggaactgttcaagctaaacctcaatatttacttacattccttcagtattttataccttcagttctcattattttggcaatgctgatgagaaatgatattatgcattttatcatcaatgtgatgcagtctctctcaaaaggatataagaaatatacggttgtacgtcaacgtgagcttaatcaaaacttgaaaaaactttacgagcagaattttgtctttttctcaaaaggtgatgatatagcaacattaaacaaagtgatgatgtacctccacgaaaatgaagtgaccaataggataaaaattgttactgttctggacaaagcaacacatcctgacccgaagtttcttacagactttgatacattagacagggcatatcctgatgttgatatggaatatgtgacaattataggcgaatttactcctgaacttgttgaaaagcttagcaatgattggaatattcctaaaaattttatgtttatcagcagtcctggcgagaaattcagttatcgtgttgatgaattaggtggagtaaggttgatactctgatttaaatagagaacgcttaagatgttaaattatgttggcattcaatgattaaattttatctttaaagaataaactcttaggtgaagattgtgctaccagaagcagcaatctttattgataaactcaactcaaaaaaacataatctggctgatttgattaagaaatttaaatacgatctaatatggatataagacgaattgagaaaattttattaggtacatttctgatgaccatcgttttatttttaatggaaattaatttgtatagtgcaggagattataccacgagcaaattaaacgaaatattattttggtcatttatacgaggacttgtaatttctgctggtgtgaatatcggaaaccaatatttttccaaattaaaggataagtagtgaattagtttcaaattttttcgatttaacaagtaatcacataaagatttttttctgatgagattaaacaaataataagaaggacgccaacggcgtccttcaaagattaaattagggctgaatctcataaagaagttcgccacacattgtttcagaacctacagctcttaattgaacagaaggatcggcactccacgtacaaacatttgccgaggcaactgtactgcagtctttatctgcattaacacattcaaactggccttcaccgtggttgacaagacggtatccggcttcaatggcttgtttgctttctttaaccattttggtagcaaacgctgaacctgtgcccattaatactaggactacaggaaaaattaactttttcataataaaaaggatttgaattggtgcctactcttggtaaaggttttcggcttccccttattttaaatgctgtaataaaggctttgttaattggtactggataaaattattcccggcgatggcgtacaaaaacttatcggttactataatatcactgactttattttctccgcggttctccagatagagacttcctatatatagttttgaatctgttttataaacatctaccactttagaatttttccacctttttgcagattcatatcttcctttcaaaaaggattgattaaaaagaagttttctatatactgtagaaaatccatttacttttaaaggaggcttttccattttgtactttccatccggaagtttcaccgatttaacgtgtgcggtggttacagtatcaatggtatttaaacggtgctttaccgtaaaagtagaatctgcgacaataaactgatttctgtaccgatatgtatatataatatctccattcgccctgtccatattaagaacaccatcgttatcaaaaactccatcagactgtttctgtagaaaatctgcacgtaattgtactttgttattatcattaccagggtgcagagaagcgatgattaattcttttgttctactgctttgggttcttaatgcaaatgaattattttcattgatcaaagccaaatgagagaagtaagcatcattctgactaacaatctcaggcttggaatgatttaataatccacttttaatcatagcaactgtaccgtcgtaaatgtaatagtgagatcctagaactcttgtttccagttttctgtaaggaagttcattaatatccagttcgatattcattttcttcttaatgaccattgcagaatccaatacaagaatttgctgcggaaattttatatttcctaaataaatatttttattatctgctcctgcaaaatagtaataagagttatctaacaatgtaatctgcttttctacaataggatgcattaaatatcttcttgtgaaattattatcctctttaataatgttttctgagctgagaaataaaaaaataacagccagacaacttagaatatttgataacaataataaagctgtagtactcaatttagaataacctgaatttctttcgcttataaaaactgctatagtacctataattacacaaaataagttgaagaataaatgctctgtccagcctaaactttccaagataccaccacatgaacaaggaacaaaatcactataattcagaattaagaagatgtaaattgtaaatgcggacattatcgctgtcgatccatataaaccaattgttcttaattttttgatggaaagaaaaatgacgataacaacttcaacaagaattaatccgtaggaaattactccagcatatgcgcttagaagaggtgattgccctatctgaacttgaaaattatcaaagtccataattttgcttaccgaagcatagcaaaataacaggatgaaaaagtagcttgtaaattctacgaattttaacttgaaggtattcattgttatttgttttatccgttttttactaaaatccattttactttcttaccacagtattcaggcatcaattctcctttagatacaaagactgttgtagaaatggatccaactgtgtcatattcgccacttactgtgcaaatttgcccagattcaagaatcacattttttgttgcagaactcacttcaactgattttttaagtaaaacagtattttattgagcactatcacttgatactctccaatgttgcttgtctcttctcggttcgtcatcatctccggtatcaagattgtccaaatcagaaatatcaggatttgatgattcacttcttgccgaagctgaattgttgtcataattttttacttcatttatgatctttgtttcctgagtttcagattcgagatcggatgatcgctcgcatgagatcattaggaatgcagataataaactaaaaattgagatatactttttcatgatgttttaagtgattgttaaaagttatcccggccaggttgtttagaattctgattcgaaattaggatgatcagccgttgttaaaaaggaaatggtggagtaatggatcctactttagggaataattgatctattactcccattaaattgttgtttaatttattgcttatcagtactttgttttggttttatcttttagaggtacatatccatattttagtgcgatattttagttaattttggcttaaccaatgtcacatgagaactaataatacctactttttaatactttttattttttttgttggtttttttcaaagtcaagaaaaacaaaattcatataagaagctttcgtctcttttcaactcgtatcaagaaaatgatgaaagggcattggtatttgttaaaatgtatattgaaaaggctaagtcagagaaaaattatttaaagctaattgctggatatgaggaagctatatactatagcaatacttcacagcgaaaattaatatactccgacagtgcaatcgttaccgcattaaaatctaaaaataaagaccagatatccagggcctatctgggtaaagggattgtatactattacaacagtagaaattttaaaaaagcactggagaactatctgattgcttttaaatattcaaaaaattctgaagatcagtatttaacaaataaggttatttatcatcttggagtagtaaagtgttatttaggttattatgacgaagcgagccaacattttatacagaccgcaaattttttccagagaaatatgaatgctgatcatgttcatgaaaatattaaattaaataatgagtcgggatatttaaatagtatttatcgtctaagcaaagcatacgcaaatatcgggatgcataaaaaagaagattcgttgattgatctgggattgcgtattttggataataaagatcagcattcgattgaatatgcttattttcaaaaaggtcggggtatacagctgattagacaaaaaaatactaaggaagctttaaagcatcttattttttcaagggatattctcctaaaaaatgatgattttgcttcactggcaaccgtttacttttatttaggaaggctatattggattagtaatgatagaaagcaatctttatcctattttaaaaatgttgattctattgtgaataaatataaatttataacacctgaaattaggggcagctacgaatttcttattaatgatgctaaagaacagcataatgattcaatccagctctattacaccaatcagcttttacgggcagattcgatcattgctaaagattttgctacgctatcgacaaagatagaatatgagtacgatacggatcggcttaatgaggaaaaaggacagctgattaaaaagcataaaaaatggaaccttttatttgctattctaataactttatcagtatttcttattgtatttttaatgtacagatctcgcaaaaaagaagcgcttttgactcagcaatataatgttttgatagaaaaaatgaccataagtcagataaaggaatcagaagaagtatcaaaacctgttcaagagcaagtaaaaagtctgtatactcctgaacaaattaatgaagtagtacaaaatctaaaagtctttgaaaacaagaagcagtatcttaggaaaaacattaaacttcctgaggttgcagcattgataggctcaaaccgcactacgctttcatttgtactaaatgaacatctagatgtcacatttcccgaatatctgaagaaattaaggataaattatattacagcattcatgttggaagataagaggaatttaaattataagatagacaccctcgctgagatgtgcggaatttctacaagacagatgttctcaactcattttcttgaaataacaggaatgagacccacagattttataaggaagaggcttgaagaattgaatcaatagtgaatcgtgtttaatatgattgttcatgaatgctgaaaattttagattatagacgatttttacggttaaataatattataccgtatgaacaaacagaacagcaagtcaagtattgacaatgtatggaacgatttaatggacgcagtagatcagataaatcgaagtgatgcagatattatactgcgctcggaggagattttgatggaaaccgacaaggcaatccgggaattaaagaaaattataggtcaatatcactttaaggattgggcagaggaaatttatttttttaaaaatactaaacctcaatttgttgcagtttatatttttcattccaaaattctatctatagaagcttctaaaccttattctgatgctaaagctttaatttcctattatacaaaagaaagagaaagtctactgcatttttacaatgagaataaggactttatcaactattaccgcagaaaatcgacttttttagacaagaaatattttgtacggtttaagtttgatttcaaattgaaattaagtccggaattgtacagttacgatttggatttttctacttcccacgatcacattgtatcacagattatagcaaatgatcttttagatcaatatttatcagataaaattaatgctgaagaaacagaaacgaacactttgaatcaaataaaaaagttagaatggactacatcgaaagtagctttaaccgaactcttatattctttacatttaagtaactgtttcaacggtggacaaactgaactttccgaaattgtcagatgggcagagaaggcttttaatattagtttaggtaactatcataagactttaggcgaaatcagaatcagaaaaactgagcgttcaaagtttctgaatttgctgaagcaaaatcttaatcagcatttagatgatttggacatttaaggtctattttattgtcggtagtacgaaaaactaccgaaaagtagataagtataagtcataaataaattttcttacaatttacagtgaaaaaatggattgattctgctgcatgagcttaaaaagcctttaaacaattagcaaatattaaaatttttatttcaaaaaaatctttcggtagtacgataatctaccgaaagatatctcgtgtcattttgaaattttgtcaaataaaataattttcaaattatggcaatatcaattatcaccaaagaagatcttcagcaatttaaagcagagctgctggaagctattgaaggtttactgaaaagaaatacgaccgaacaaaaattgtggctgcgcacttcagaagttaaaaagctgctgaatatttcatcaggaacattgcaaaaccttagaattaacggaacactttcctatagcaaaataggaggcacgctctattacaattacaaggatattgagaaacttatgcagggttctaaagattaatctataacgaagacttatgggaaaatctaatagtataatcggatactttgcccgatttgttcaggacagccagatgtatcctacacatatcagcttatatgttgcgcttttccagttgtggggcagaaacagatttcaaacgccattctcaatttgtcgaaaggatgcaatggaattgagcagtattaaatcctttgcaacctaccataaatgtattaaagaaattcacaatgcaggttttattatttatagcccgaattacaattcttacaaaggaagcttaattgaaatcattgactttgaaacactcgataaacaaaaagtgaacattgaaaagtatcctgtattgattccaaattcggaggttgtatttattaaaccagaacttgatgagattgaattatattttaatgagtgggatttgccttcggaagaagcgaagcaattttattcagcttatcaatcgaaagattggaagctttgtaacaataatccaatgcgatgttggagatcagccgcaagaatgtggatttctaaactcaaaattagcacttaaagttaggactatgaagaatttaaatcttgaaacacctttgtctcaactgacggttggagagttcttggaaatttcaaaaagttttttatatgagaaaaaatatgaatatggattaaagggattggcaaagatccttggatgttcagtgtcaaaagcttccgaaataaagtcctcaggaattttagatgctgctattattcaaaggaaaaacatcatcatcattgataaagaaaaagcgttgcagcttttctccgagaaataagatgtattaccttgaactgatccaacggttttggctgtttaataaaactgcaaaaatgagccctacagaagtgatgttgtacttgtatctgctgaagactggttttgaaaacgaccgatatgattttaaaatatcagacagcgtaattgccagcgagttaggattaactcagaaaactgtaaaatccactaaggagaaattaaaaaaatcaggtgttatacaatttcaaaccgcaataggtcgtccctgttcttatcggcttctactaaattattcattcgatttcgaacctgacaagaaaaaaaaagataaggttttaaaaaaagaaaactttctagacttaaaagttttacaagtacttcacgaaaatggagttcctgatgctgcaaacagcgatattccatcctggaaagaattcattggatatgctgaaacattagaaaactatgttcagactcttgattcaagtatccgaataaaatacgaaggctggattcagaacaattggaaaaatgctcttggtcgttcgataaccaattggaaggctacattgaagagcgctattccttatatgagagatgggaatactgaaaaatctatttcggtcgataacattcccgatataaatcggccggaagtttaatgcgaatttattaaatcatcaaaaaaatgaaaaagaaagctacaatcatatccgatctgaggccaggacaaaaagttagcatcaatggaatgctggctgagtataggggcattgaaaaagtacggattccaaattttggaaaggctgaaaagagagtttttaaagaattagaagtaaataattttaaatattataatctttctgatggtttaaagacacttaagagcgaaaaaatcaaattaataaaataacctctgattacttctaactttatgagtttcgatgataaagatttgcgattgatccgaaagaattttgaaaacaaaaaagaagtaagtcccgaaaaaataaggttgggaaacaattttgttgatgattttatttttgatggttctgaggctgccgacattccgattaatgcacttcgtgtcatttttaatctgatttcaatcatcagcagtgagcaattcaggccggaggaccgaccaaaacagctcactctttttgatgaagaatttgaaaccagcaataatatttttgcatccattaaaatacggaatagcaagatttcaccgagtgggtcaactaagcaggtcattgatgcttatgaatttttggcccaatttaaaatgggttggtataagtctttaaattcaaagggaaaagaaataaagactttcggaggattgatttccacacctagttatgataaaagaggttacaccacttttttagtcagcagctactggcttaaaaagcttgtggtcattccagagtataattatgtcctatacaatttggtatataatgtcaggaataacaaacatatcatatttgcgatgtggcttgcaaaactgccggaaacgggaactgctcttaagcttgccactctgaataagaagtttggacttaattataaaacagcaaacgatttctgtttcaaatttctaaaacaagtgagaatcagccttgataaatacaataacctgtctttcaattataagtacagggaagatcttatcttaattattccatctaaaacaaattttatttctaagacagaagttttagaaaatccaaatagagtatctgaagtcagcataagattaagttattttcgaaaaagatttggacttcaggaaaatgaaatgaagcaattttttcatcaataccgaaacatcccgcaaacccggctgttgattgagaaagcctttaagagatttattaaaaattgcagattcaaaaggataaaatcaaccctcattcaagggatggaatttttaaaggaaattcagaattttttgatagaggtttacctggagacccgagccggaaaaatgcttcccaatagttatccaataatactgtaaagtcggaattgcactcattcgcaattcggaattgcggtcgttgaagttaaatgtatcttaaaatataatattttaagaagtacttttcggaattgcactcatctcaaaattgtgaaggaattctaaactgtagataagcgctcaaaattgtcaataagtgcaggactttgtagacagtcagaaaagtaatttcggaattgcgctcatccgtatatgatggtgttatctgaattgcgctcattgcagtttcggaattccgctgattccaaattcggaattgcactcattccaaaagtgaacaatagtctttatccatagtgcatacgggcaattactaaaagtataataaaagaatttaaaaagtctttttttacttaaaagtaaaatgtggataaaaaatttactttaaaaagaaaaaaaatgaattgtgaagaagccaaacaaaaaattatgatcagagatgtacttgaacactataatttgtttccctctaaagaaaacagaaaaacagcattttattttgcgctagacaggaatgagaaaacgccaagtttgtcggttgattttgtgaaaaacagagcttttgattttggcaccggcaagagttatgatgtcatttcgattgtccagcagataaatcaatgctcagtttccgatgctttaaaatatttagaaaagtttaaattttcaagttttgatacaaaccggaatttgatagcgtatgacgaaatgcaatataaaattctgaaagtgaacaatattcaacattttgcattaatagactatttagaatcaagaaaagtgagtgcacaaaagaatctgcttaaggaggttcattatcagatgaatggaaagaagaattttgggttgggattctttaatgattccggtggagtggaaatccgaaataaatattcaaagatttgccttggtaaaaaagatgtcacgttaatcaaaaatgaacagaacacgtttaatgaaattgctgtattcgaaggttttttcgattttcttacttttcaaaatataagtaaagagccaaatttagattttctgatcctgaattctacttctatgctattcaaggttgagaaggaattaaaaaagtaccaaaaaatttctttgtttttagataatgatgctaatggaaagcttgtgaagtccaaaatttcaaatcagtttaacaatgtggaggattgctctcatatttaccttgattacaaggatttgaatgaatggtactgtagagagtgacaaaatacttgatagaggtattttgttactaaaggcgaataagaaaataccaagaatatttaactgacttaaattaaatattgtttaagacgaactcacatcgttcttcaggagttactctttgtacttcaataagtttataaccaaaatttagctaggtctttctcatttgatcaaaagtatattcagcttcttcctaggattgttatctttcattatctgtttcgtaaatctccagccagggcggaaggataaatactttttcattgtattgatttaatcttgcaatggccatcacttcatcaggtataggaattttttgcattttcatatagcagattgcgtccaagatccccctgtcaaaaaaactgttttattaaatgcttcactgtttgcgctttgataagtttttaaagaagctttaaacattaactcagcatataaagttttgtttttccaaggtaatgcttcaccactaatttgaatctgttgctgaataatgtgacgggcgtcttcttgaatgatatgattgcccctgttcttaagtttattcaataatctagtcttgccaacgcctggtcctcctgtgattacaaagtaattttgaaatttatctttaatcatagattgcgattgtgataaaaaaaaataaatcccaattaaaaactgggatttattttttatcaattattatttcttagattcttcaacagaaatctttctaaaatctttaaataatttactcagctccaaagctgattttctggctctggttccggctgctttgtttcctttttcggactgttgctctgcttctttagaaaatgcttcaaattctgcattaattttttcaataagttctttcatagaatagatgtatataattagttaaagctgcaaatataaatttttattaggttttactcaatatatatggtaattggattggtactaaaacatttatactagatattgtaagtctattctaagtaaaacgtttttgctgaatgttttatcctgatttccattgagaaaacgctattgaaaaatttcataactgttgtctcggttttttactattgcaaatttaggacagcatcactcactcaaaaaaatctttttgggtttctacaaaaattctttccacttcattccaataatttttccagacactcctaaatccttcggacaaaaagatttcaagcccgattcatctctattaacaatagaagtgaatcgggttttgtgtgcctgataccgtcctctaatcattggcaaagaaaaagccggaacctcagttatacgaatcaattcaatgcaagacgttctttgacatcaacggaaaaaatcaaataaaaaaaatcaaatactgtttttcaagatcttattaaaaaaaaagccgagtgtcctcgaaaccaaatcaattcattcgggaatttcaaactaaatcaataaaaattaacaattaaaatcgaaatattatgaacacaattatcggaagagtaaccaaaaacgcaggaatcaacattttaaaaaacgacaagcaggtagtcaacttttcagtcgccatcaatgacagctacacgacaaaacagggcgagcgcagggaacagacgacctactacaattgttcgtattggataaacgcaaaaatagcagaataccttaccaaaggtacactggtggaattgtctggaagaaccagctcaaatgcttggattggcaaagacggagaaattaaatcaggtctcaatttccatacttcaaatatcaaactgcacggtggaggacagaagtcggaaatgcaggtcaatagaagtgaaaagctacagaaaactaatgcttttgccgaagatactgacgatgatttaccattctaataagtaaaactatggatacacaatttaattttcagataaaacaaaagaaagacaaaagggaatgggaaactattgaagtctactatcagacaatttgtgacaggtctacggcaattcggtacgcaagaaaaatatcaaaaatttttagttccgaaataagattgacagagggagaaaatcccttcagaaccagtggaacatatatttatgaaaatgactaaaaattaataaagtccacctgccaaaatcaaatgtattggcgggtgcagattttatttcaatttaattttaatactacaaacaatgaaaatatcaacaatacccatagaatatttgctgataaaagcaatgaccgacagcgaatgggacaactgtaattttgcagtcattcatatcacggaagattggaaacaaacacaaaaagcgagattgaaagtaacaaaactccttaaaaatgataacgatttaaaatggttgaattacgcagataccaacatcgaatttatcaggttttcttctgaacaatgtcctcatatagagcattgcttatctgaaaatagtcgattttacattgacttggaaagtgacaatttgagaaatctatttcaacccgacaacaatctgaattgctatcaaatgcaggtctataaaaatggaaatgccatttacaatgcttttgggacgcatacaggcgaagagttttggactgagcaattctcattggaaacattaattctgtaaatatgacacgttcaaatcttcatattaagttcagcaacggcaaatctttgatttgcgttgctgattccagctcagcacccgaacagggttatattgtagaacaactgatacagcccctacttttacttgatgacagtgaacaggaaatgcagttgctgtccgctcattgcacaatagatgaaagaagaataaatgcggattatcgctataccattgaccttaagaaaaaagaggttcgattttttgaagagcattacagctacaagaaagaaagatttatcaggggcgaagatattacataccgctatgacgaatacattaaaaatttagaaaaaatcaaataatcatcaggaattatgcaaaccaattttttcagacaaataggaaaaatgaatctgacaggagatttacatattatagtacgaacaacaggtcaaaataactatgtgctttccgtattgcttaacaatgagcaatgcggagacgaagcccgaaagctgattccacctttgaatctgcgtggaacagcagaggatttggataatggcttttttgagacagtctcaaacccattacagactgcttcgggattaatggtcgatatggaaagctttatgaaacagcttgaagaagccaagaaaagttccgcaatggaaaaggaaaaaaccgatatggaaaaaaaggaaaaggatgcaaagcagaaaaagtataatgatgctatagaaaaagccgattcattcgaaaaaaacggaaaatataaagatgcgtggtcggcacttcctaaaatttcggattatcccgaatttactgaccacatcagaaaaaagcaggatgagtacgaaagacattttgccccaagtctttttactgaaactgtaacagaaaatgttggatcttaaaaatcagatgtatgttattagcgacaaaaatagagaggatttttattttgaaagaaaatggacaggaaatccgactgagcgatcccgaaccaaaatggagcgtagaagcagtaatgaatttttatgccaatacttattcaattttgaccactgcaaaagtttccgcaccaaagattgtggacgatactgttcaatatcattttgaaagtgtaatgggaacaaaaggataatccgaaaaaacttgacatcgatgttatttaattccaactatctggcaagcgtaaataataaaatcaaaaaataaatgaatgcaatccaaaatcatatccggaaaaataacaatacccgaagaacaacagcagataaaactgcacaggcaattaggcgagtttgcccattggcttcaaaaaccaaagaccgccaccgagatacggaaggacaaacggaaatctgttcccgtgtcaatgctaccaatgcttttttgaaatgtacattcatgcctaaacaggaagaaatgatgattgaagaaaatcatcaggaaataagaaaaacggagagggatttttataacgccctctctactttttcccaaaattacaatcttaagccgatgcagactaaggattttggttttccgtacaatctggctttagcaatttgggacatcgaaagaaaagtgataggcaccaacgaagattggaatagttttaaactcattaaaaaccataaaagcatccatttcgcaaaggaggaacaatgtgatacaggtgcatctctatattacattcccatcataccactttttaaaatgcttcgtgataaaagctgtaaaatgaacggacaacttttattatccgtttgcagttatctgtatcaaattgttaatgtgccttattacagaaagcaggacagttatttatattggagatacgaaatgcacgaagatcggatagagcagggcgatgaagatgaagaagacagggaagaattcagacgacagtttaaaattgcaaaaagcattggcgacaaaattcagcaaaagttagcaagtccgaaaaatctggaattttttgaaaagcggttgaatcgttttaaaagcaaaacggactttgactttaagtgctttaagttggcttcagaagctttcagtctttttaacacatatcccaagacaacaattttcagaaatcagccagcttcaaaaaatccttacgatgacgattacagcaatcagtcaataggaatggaaatgtatatttcctttctagctgatacgaagggaggcttgtatcagaatattgaagaaagcattaatgcagagtttaatgagtacggaagtattgaggaaccgactatttatagacctattgacggtacaacgatgaacaaagctgattttgattttgaaaaacgattattcagtctgttggaaaatttatactgtttattaaccatttaaatcaaaaaaatgaacgatattatagacatagcaaaagacttcggaacattatacgaaccgaagtctgctctggttttttatgaatccttggatagtgatgcaacgatgtatgtagagcattttgatatggacagaaacggaaatccaatcaatgcgcatcctttgactataaatgaagctaaagtgttggcaaaggctttacacaccgatgccgaaaaagataaaacttttctaaagccaaaagggattttaccaatccatatcctgaatattgacccaagcgaaaacggttctgtcctttggtacaccgaatcccaaaaacgacaaatgtactttgtgaaaaatcttgatattcccaacggcacagcagaagttcctgcgatgatttggaaagcagataaagaaactctttcgatattcgccttatttgataactccagacctacggagaaaacaccattgtattatgccccttttttcaacatctatgaagatggcagagtttgtatgggaacagttgatgttgatatcaaaaagtcggcatctgtagaggaatttataaaggcgtgggaagattattttttcaactcttatttcagtcatttattggacaactataatccgataaaaggtaactgcgtaaatttttggaagaaattaattgaaacaaaagaagcccttccttctaaagttttgaaaagaaataagaaaactcttaaaaacttattacgatgaatacagaaatgatagacaatgaaattgtcagaaaaaaagttcacttcatagatagtgagttcctcaatcctgccaatccgattttagtaaatttaatcggagcaggaggcacaggttcaaaggttttgacagcattaattgaaatgaatcacagtatgattgaattagggcacgcaggactacaggttcggctttgggatgatgatattatcacaaataccaatttaggaagacagagatttgcagaatctgaaacaggcttgtataaatccgttgccttaattaatcgggcaaatcgttgggcgggaacgaattggaaagctgaaacgcaaaaatttgaaaaagacagatttgggagaatcccacaaaatgcaaaagccactattacaataacctgcgtcgatactgtaaaagcacgatttggagtagcagaaattctgaatgatcgaaacgaatacagaagctttataaatgacccgaaatattggatggactttggaaatagtaaatacacaggtcaagtattactctctacagtaggaagtgtgacccaaccgaaatcagaaaagtacgatacaaggagcaatcttccttatataaccgaggaatttggagaacatttaagacaatcagaaactgaagatgatacgccaagttgcagtttggcagaagcactggaaaaacagagtttgtatataaattccgctttggcacaaatgggatgcgctcttttatttgatttattccgtgatggactgacagagaacagaggtttttttctgaatttgaaaaattttaattcccaaccaattaaaatttagtttttgctgtccgacgaaaattgggcggcaaaaatgcaattcctccctgcggtcggaaacgcatttttgctgaaagcggactaacacaatttcgaaaacatctcactactttggctcaattatttttcgaaaataggttagataattattttatctgaatagacttttagatcatattcgttaaatttgaaacaaaagaagattttaagtaatgatatatgcgataccaacaaaaaaagggctaggaattgaaatctggggaacgcgcgatgacctagagtatttatacgaaattatttcaaaattttggaacaatgaagatttcatttatattaaaggttatgaagataaaaataaattgattagtagtttctcatatgaaatccgaaaagcgtcttatggaagtagattaacaagatcaaacagtcattattcatatgaggaaataccttatgtaggttgtcaaatatcttgggttcatattatattttctattgtcgtattaaaatataatatgcgaatggttgaaaatgataagggagacattgcgatgtttttacatctagaatactggattgagcgagcgatggaaaagtatgattcagtcggagcaaaaaggcttttaccttttttagatgatgctatcaatgcgggaaatgaatatttatatttatatatgagacacattaatgctactttttttgaaatgaaaggtggaaaaatagcattcaggaaattagctgacctgatgagagtttctatttattcttctaatgagtataacgatttcttacattttcttagttcagaggctaaaaaacataattgcaaaattgatgatttggaattaagtgataacgataaaatttatgaaatagagtggtaagttttaaaggaaacataataaagaaaaaatgacaaacgaagctctaaaatctctactggaaaagttaaatgcaaacaacaaatcatctagcttggttttcctgagaccattaagtcccaatgtagattttgcaaaaatttggattgataaaccaaaaattacggatagtgttactaattcagatggaccagataatttttatttaattaaaaacaatgataagaaatatgttgcaattgtttttgatatgcaaagagatttacattggtttgttcttccagattacagagggatgggatatttgacaattgcaatgaaagacattattattcctcatttatttttgagtagagatgaacaacggataacaataaaggaaaatgatattgggaaggaaaattttacggcttccgaaaaagttgcaataagtttgggatttacaacctccgaagatggagaatatttcctatcaactaccacaaatattatatttgatgataacgtaggaattgacaccccgttttctttagaaagaatcaatgagcttaaaaaacaaatcaattatttgggaaggtctctttgggcaatacagaccgaaatagaaatgaatcttggaaatacagattattcagaagaacttaaagatttggttaatcaaattagaaatcacacttggaaattagaagatttttattggtgtaaaaaatcatcaggtatttatgaataataccatataattacaaaaacgaaaaaggcaaaaaagcatttcttccctacaatcggaaactccacttcgcgagaaataaaatacaaccacattaaaaatatacaatcacaattccttagcttgcttttataaaaagcttgtgaaatactgtattttttttgtattacccacattagattggtattatcttttaaatagtaactgagttataaaatacagacgttttataaaaagataaacccagctttttaatacctacgtaaaatttactaatgtttgaaaacaacctaagtaagttgaacgtgtgttgcaattgtacttttgtaaaaatttataacatcaaagtttcagctacataaaaaatactagcttctttttaaaacttattatttattttttctgttaataaacaataaatgcataaccgtttaatgaacagttgttaaaatatttttaatctgaaaattgaatttatttttagagcaggttatgaaatagcatatcttgtggattaaaagaaccaaaaccatcttatactcggctgtaattccggacaccaaaaaaatcagatttcttttatacctaagtaaaatttactaatgcttgcaagcaacctacgtaaattttacctaggtttctatcgtacttttgtaaaaatttacaaatccaaagtaacacctacataaaaaatttacaacttcttatttaaagttaattgtttgtctttttcttaaagatgcaataaatatgtaactaattgattttaataactaaaattgatttttttatctctgaaaaattaaattgcttttcggagcaagatgtgtctttgtacccacaaattttagcaaatttctgactccaaagacgatcttgccttttctgcaaaaaggaggaaaaactgcggaacttgtttttctatttaaatgaaattaggtttaagaatccaaagttgtccagattgttcttttataatctttgaagattccagactcatccaaagtattcttaattagcccacgtccagtaaaagctattgtttgataggtttttatgctccaactttgccatagaaattttaccgaaaaatgagaaaattatttagccttttaatacttgtttttacaattatcgtcaaagctcaagtcggagttaatacacagacaccatctgcaactttagatatagttggaaaaccaaatttactcaatcattttgatggcttaattcccccacgaattacaggtgatcaacttgcaagtaaaaattattcgatacttcagaaaggtgcgattgtttatgtgacccaaccagcgaccaatcttttggggcaggttattcatattgttgaagaaggatattactatttcaatggacagttgtggaatcagatattaaaggagcctattgtttacgatgcacttattattcttgacgatactcttccagcaaatactattacggaacaaaacgcttggaatacatatcttccttttcctacaaatccacggcagcacacattatcaaccaaatcatataggttgggaacagcaggtctcggaataacaggtgagattgatgcaaggcgaataggaacaatcggatatcttgatctgagcattagcagctcaactccaataacttcaaattatgtgatgctcaatctttcgaagccattgcgtgatttaggttttatgtcagatggcagtgtaggttcactaaacaatattttggtaagcggaagtcctaatggaggaggtttaggtgtagaacaaggcatagtttcatttacaaacgtcgatttccatttgcttttgtggaagaatcaaattgaaaagtttagcggaattataaagggtatgaccacatttccgattaactatctgaatgtggttgaatgataaatgtaaaggattctgaaaagaatgattatgctaaaatcagaatttctgtcagtcaaaaggaaaggtggaaaaaattatgcaaggaaaaaaatatttctctaacaagtctgataattaattctgtagaaaacagaatgatggacgatgagagaaaaaaagttttagagttcattgaaaagcagggtaacatttttagtaaaattgaaaacaacatcaatcaggtagcaaaaattgtcaatactcagaagtttatcagttcacaagagctgaatgatttttcagaaaagatttcagagatttcggaattgaaaaaggtgcagaataggatatttgaaaatatttatgccctgctggcaaaatgattatcaagataatggcttcggcaggttcaggttttccgggagtaaattataatgacaagaagatcaatgaaggaaaaggcgagttgatgaagatgaaaaatttcccatcctttatcaatgaagatcgtagtaaacagcaggttcaggattatctgaaagcgatttcaaatggaaataaaaaggttttaaaacctcaattccacgcaatgatctccacaaaatttcaagaacactcaaaagaggagttgactaaaattgctgaagattttatggatgaaatgggatacgggaaacaaccatttatcataattcatcacaacgatacagaaaataatcacgtccatatcgttacgacccgtgtggacaaagagacagggaagaagatcaacgatagctacgagaagctgaaggctcaacaagcattaagcgatactttagaaaagctttacggaattaagtcagatgaaaaattgaatagacttctgaattacaaaattagttctttaaaccaattagaaactttacttaatagaaatggatataaactgcgcaaaaacgcaactgatgaacaatatttgacgattttaagaaacggagttattcaacagactttatttgaaaatcgattgatcttagataataaaaatgataaaaacagaacaaagcaacttcgggcaattctgtcgaaatataaaaacatctattccaataaagtttttagagttgaggattttaggaaacaggaaggaatgcttccggaagaaaagctaaaagaaaaagatcagcttgttcctaagattgaatttgaaagtgagcttcagaaaaaactgagagatgtctttgggattgacatcgtttttcatcacaaagacaagtatcaacctttcggttatactttaattgaccataaaactggtacagtttataaaggaagtgagattatgaaattgaacgagttatttgagttcactaccaaaaaaattgataaaaaactgtttgaaagtctgaaggattacaatgtaagaaataatgaaagtaaaattctattattggattttctgaaagccagacaaccgaaaaatgaggtaaaggaatttatgctttttgggaataaaaaacttaaaaacaaggaaatctacaatgccgtcagaaacgatgttcgggagtatctaaaaaaacaaaacaatccagatattaatataataaaatcagaagatggaaagtattatatcattcattcaagactgcattatatcggagaagtgcaaaccttgattggagaaaagcaatatcaaaaattgcttgatcctcagatacaggttacatcaaaaactgaaaacaaaacaggaaatgaattgaataaagctgtaaatgaattgttttttgaatggatgaaaagctctggctctgtaaaagatcccgctgaacaagaacggaaaaaaagaaggaaacgccggtaaatggcagtaatttaattaaactaaaaaaaaactataactaagccttatgataataacttttgggacgcaaaaaggaggaaccggcaaaacaacgttagctattgcttttgccaactacgtcgcaatgtcttccgaaaggaaggtaaatgtcttcgattttgattttcagaaatcattttaccacaaatggaaagaagatgaactgctcgaaattccaaagctgtatgatgtggaaatcattgatgaggagaatgagcaacctttttcggattttgaacatttgattgaaatgaaggaaagtgaagacgttaatgtgtttgaccttgcaggaacattggatgcaaaatacagtgatctgcttatttacagtgattttatagttattccttttgaatactctaatgtatctgcaaaatcgaccttggtgtttatcaattttttaggtcttctggaaagtcaggcggagcgggtatttatccgatcaaaatatgataaaggctataagtaccagaatcaggaaggtatggatgccgagattagtaaatatggccttctgttaaaaagcccggtttttaaaaggaattgcctgcagactatagatacaaggaaactgacgtatgaacaaaaatatgctataaaaaattccttcttagagctgacagactacattaataaatgtcttgaaattactttataacaaaatcattaataccatctcaaatgacaaaaataattatcagcattatctctgtttatctgctatactacgcaggaaacatcatttatgaccttttcctgaaaaaggatattactaagaatcaagatgaaactgaagaattttctttgaatgattttcttgataataatacaactgaagtacaagaagtcagcatcgatgatgtcgaaaatatcaatactcctaattcatttaacaaaaaagaactttctcccgtaagagaggaagaacaggatgaaaatagagacttagaatactggagaaacaagttcgagtccgaaaatgatattgacagttttgatgaagtttcagaatctaaagagccagaagaaattcacaatgttgaacaaattgaaaacattcaaaatctcgactcaaaaaaacaatcatattataaacaattctatcagttcttaaaccttgccgagaccagtgtacaggttcttgcagaccgtgatggttacaaggtttatcagtcgctgatctaaacattaaataacttttttcaattacactttgatccgccattaatggtggataacacaccccttatgccttttttcgagcaaaataaacacaattctaaccataaatatttaatcattatgacttacagaagtatacgtaatcaaattattacaaaattaattactgccacattattgcttcttgcagtaacaccaatgtttgctcaaggtggtgcaacagcaatttcgaatgcagccaatgacattaaggattattgggatcccatcaagcttattctaaaagcagttggaggtttggtaggtttcataggtggtcttagagtttacaacaaatggacgaatggtgatcaggatgtcaacaaagaaattctgggctatggaggagcgatgatcttcttattggtagttccggaattcgtaacagcattctttgcctaatatgggtttctatctctacaaggggcttaagaaaccccttgtattcttcggacttaaaggaaaatatatcatctattctgttggagttatcggtgttggagttgttgcttcactgatattatcaaaattcggattacttggttcgctactcggacttgcagtaacagcaggaggtgtatatctcattttcaaaagacaggacaagcatggtctttattccaagaccaaaaacttcaatcagattttaatttttcctaagaggatattcaacgctaagcttttaaagcaaaacaaatccgacggttttgaaatcaacaattaaataaatcaaaatgaaaatcaaaaaacacgcatttgacatcccatttattgggttcgattatggaaaagatttcggatgggattttgatgtcttgtttggacagtatggaaatccaattattggtattcgtatcaaaaacgctgttgagcaatattctgctgatcccgataattacctgaattttcatacggttttaaatcaagtcgtatccataattggagagggtaggattgtgcaaaagctcgatattttttcgaaaaagaaatatacagcaaagcattccaaccagtttctacagcagaagtactcagagcattttgacgggaggctttttaaaaccatcgagacagtattgttcttcacagatattgtggatgataagctgaaaaagaaaatgaagcattatcatttctccgataaaagttacaaagagcttcgggataagtgtcagaaagtatcgatgtttttgaaacagaatgattgtgaaccgcagtttttatttgaaaaagattttgagtattatatatcaggtgtactatcaatgcacttgtcggatgttccaagttttgataacattaaaagtaccagtgaatacctgcagatcggaaaccgatttgtcaaaaatatttcttttgtcgatgttgaaaacattgatttgccttctgaaattgaaccatattctattcttggaggaaacggtgcagcctcagaaacagctgtcgataattttacattcattaatgaactggaagattacgagacaattatctacaatcaggttattactattcctcttcaggcacagcagcagagggaactcgacaaaaaaaagaaaaagcacgaaggagcagctaacaattctccatccaatgccatcatagctgaagaaattcagacgctattgcacaacattgcagttgacggacaattggttgtgaatgctcatttctccatattattttcggcagagacattagaaaaaatggaaaatatccagtcgatgattgaaaataaacttttcacaaagggaatcattgtttctaagaatgcctacaatcagctggaactttttcggtcagccattccagggaacgccactgaactcagggagtatgatctttttatgacgacaagcgaagcggccttgtgttttttttttaaagagagttaccccgtgaacgaagaatccaacttttatttaaggtttacagatcggcagggtgttccgttaaaggttgaccctgctgatttaccgatgaaaattggacggattaataaccggaacaagtttgttctggggccaagcggatcgggaaagagctttctgatgaataatattattgagcaatatctcacttataattatgatgttgtcatcgttgataccggagattcttattcgggaacctgtaaatataagggagggcgatacattcaatatactgaggaaaagccaatcacgatgaatcctttcctgatggacaagaaagaattcaatattgaaaaaattgaatttttgactaatcttatcttccttatctggcaaggtgccgatgcatcaatgtcatccgcacagaaatctattttagacaatgtactgatgtcatattatcatcagtatttcaactcaggaactcagtggtatgaccacaaaagttctgaggaattgattctttatctgcagaaatacaatattcatgaagaggatattatagaagaatttgaagatcaatttgaaaaaccacagacgttttatgagattttagggctttcatttgatgctgagtttgagcaaatcagagatagcggaagaaaactgattaaattttaccatccggattcaaacagaaataaccctgactatgattcgaaaaaattctttgaaatttatgaagcgtatgaaacgcttattgataagaaaaaaaggaaaatttataatgactcccagctggtcttaattaaagcgaattcgattgtaaagactcctacatcttcgcatgaatggaatgcagggtttagagttgcgattatcaaaaaaattgttgaactggaaagcaaattatccgttccggaactttctttcaatggattttatgactactgcgataaattcctgcctatgtatttgaataataaaaaatacagtattacagaaaaagaattcaatctgagaacttttctattcgttctgaaggacttttacaaaggaggacgatatggaacgactttgaataatgaaggagacaatagtctctttgatgagtcatttattgtttttgaaattgataatgtgaaggataatcccaagctttttccgattgtgacgctgatcatcatggatacgttcattcagaaaatgagactcaggaaagacaggagaaaagctcttatcatcgaagaagcctggaaggcgattgccagtaaactgatgggaggatacattttgtatctatataaaacagttcggaaattctggggagaagccgtggttgtaacacaggagctggacgatattattggaaatgcagtggtaaaagacagtatcattaacaattctgatactttcattttacttgaccaaaccaagttcaaagacaattttgaccgcattgcagctttactatcattaaacaaagttgagcagaataagatttttaccatcaacaacttgaataacaagttcggtcgaagcaggttcaaggagttttatctgaaacgaggctctaaaggcgaagtatatggtaatgaagtttcaatagagcaatacctgacttacaccacagaaaaacctgagaagtctgcagtcgagtattatgttcaaaaatacggaagctatgatgaagcactcatcaaaattgtatcggatctaaaatcttttggagacagtcttgaaaatcttgtatcgctggtcaatctgtataaaaatccattggattcaaaactttattctttttacaaaatgatgaaaagtgaaaacaagggaaaaaatgttttcaaaattatcagtgaggaaatggatgactgccaaatcagtttttcagaattaatcgacaaaaaataccagtatgaaaaagcttagtttattctttttaggatgtgggagttttctgtttgcccagaatacctacatcgatcctacggttacagctgcaatgatattgtattctgaaaatctaaaagccaagcagaatgatgtcatcgaagaaacgtcaaaattgaaagacgcgcaaacttgggtagggactcaaatggttgcagccaatgacattcaaaataagatactgaaaggtttgaaagaagtttccggaactctacaaaacggaattcaggtacaacagatctactctgagctcaacaagtgctatacttattcgtcagaagtagttcaattggcttctcagcatcctcagtatgccatttttgggacaaaagcttcacaaaaaacttacgagcaaagtttgaagatcgtaacagacgttactgatattcttgcatcgggcgaactaaatttagctactgcaggtgaccgatacaagattctccataatatttccagtaacgtgaaaactctgaagctgtggcttttggcaatcaaattaagattagaaaaggcaaacagattaggtttttggaattctatcaatccttttgcaggatacattaatactgacaaaggtattgttgaaaacataatgaacaggtacaagcgaaatttttaaaactgaagtgatgaaacggatttggcaaatattgtctgttgttctgatatatattttgattacttcttccggcggtagttcaacaccagcttggcagcaggagaatgtttcttttcctatgatggatttggagattaatgcatctatgaaagaacacaatcgacagaaagaaatgagacaaaaacaaacgctgaatgctactgtagaaaccgctaatcagacgcaatggaaaaatttcaaagagaagattaccaaagtgcaggacagactgcgaattgtatcatttgcgattcaggcaatacctacgggtgtcgcagtgagcagggaaataacgaagattacagataatcagacttccattattaatgaaatcaatacagcaccttattctataatggctgtcttacctgctcaggtgcagtttgtggatgatctgcagatggtcacaagattaataaccggaattatcctgtcgtacggagccattaaccaaatggagaaatcagaacgtaaggttttgctggattatgcattaagtgaggtcaaagcactcaatcgaaattctacctatatgcttttgaaaattagagatatcaaagccaaagttttaaggaataaaagagcatttcaatactatgtcaacagagacaaacaagtggtggaaagtattatgaacaatattaaatccttttaagatgaagaagatatttaccttttttatagctgtattttcagggattgccattaaaagccagcagattgtgattaatgataaactcttgtcacaaataacggtcaaccacggtgtccgattagccagtgagcaggtttttttagattcttataaaaagcagaaagaactttatgatgatatcaataataaaacaactcaaattattgctattcaggaatacatttaccagcaacttaaaaatgttaattcagcccttactcaaagtaagaaattaatttatctctaccagtatctgggtaaaatcgtgaccaattccaataaaatgcttgacttgtctgctcagcatccggaatatgcaatcttggtttcgaaatactatacagaaattgaaaaacagactttgaagcttcaacaggaagttacccaagacgtactgaatgaagataaagatttcctgatggatgcaatggatagggagatgttgattgataaggtctttacaagagtcagaaacattaacgggaacattctgtatatcattctaagacttgaaaatgcaaagaagatcccatatctgtatcaggttcctgtaatccgaaactatctcaatgtcgacaaagcgattgtcggagacattatccaaaaatacaaacacatattcaattaaacctatgcaaaatctatttaaaaaaggaaaaattttcctcttgttatttattaccacgcaagttttcggacaaataagtgtgaaaagactgaacgatcctgccattgttgcacagcataagcgaatgacatttgaaagttggggagattggcgaccatatcccaaatattttctgggtattcaaacgaattttgcctacgctacggtatggggaatgtgggctcctaaaataaacagagattataaagatggtgctgatatcagaccattaaaaccgactggggaacaaaatttaagactggctcaattgaaatttcaagaagaagaagccaaaaaaattaaagcggcttctgatacaatctataaaagaagtgttcaggatttcgctcactggacttcagcaactgttgatgtcgatccactctggttgttgtactacaaaaggatgttgaaacccatcacagaatttcccgatacacctcagaattttatggagtggaggctgaaagaccagcagacctatgaaacacttttcacaacgggaacattgaaaagactgcaggaagaactggatctcattaaagaaaaatattccatgtcccgctcaatggatatgccgagaggaaaacgttttattatgtatcacgaaattctgatcaaatggcgaaaatttgttcaggaattaaagaaacacaatgataaaacgacattgcttttagattataaaaatattttgaaagatcattcacctacagcaataccgtcccaatccggctcctcttctgataaagagattgttcaggatgtgatggaaaaatataaacacaaattttagagatgagtaaatcaatcacacttactttttgctttatcgcattatttcttccggtttttggctttgctcagaccgatagtgattatagtaatctgcttcagtttttgaaaggggacggagcttttgaaaaatggtttatggaagtttttaccaaactcgataacagtgtacaggacagtgctcagggttcagctttggtaggcagagctattggtggtttgggtgcgttaatgtacctcgggtatatgggttggcagatggcagcaggagaccgagaatgggaaattgtgccgatgctgaaacctattcttatcggattcacattgatttactggacaggatttgttaacctcattcaagcaccttttgaagccattgcagaaccgggaatagccatttttagtgacatcgaatctgaggtcaatgatttaagaattgaaaggttcaaaaagcaacagcaattattggatgcagttattaagcttaatgctgaagaagacgccaaacaggaggttattgataatacatcgaaagatgccgatgattcgtggtttgatatcagtgatggtatagacaaattgttacagcctatcaaagaatggcaaatcaggatggaattccagttacaaaaattggtagctgaaatcatagaatttgtatgtctttccattttgagagtttgtgtttatttcatcttttttattcaaaagatctgggcttatatcttgatcattcttggacccatcgctgtcggaatggcattgattccgggatttgaaaactctttgtatagctgggtttcaaaattcatcaatatcaatctctacactttcgttgcgtataccattatcaatatcggacagcagttgattgcatccggttatacaatggaaatagagcgttatgatacgcttctgactaacggaaccattaccaatttagatgctctgatggtttatgtgagcaattcaggaatgatttacaaccaactttttacctgtgttgcttatatagttacaggaattggagttttgatgacaccgacaattgctgatacgatagtaacagcaggtggtgcaggagcaatgacaaaaatgaaaagtgcaatgggtagaatggcaagcggtgcaaaaacagcagtgcttgctgtgaaaactggcggtgcatctgcggtaaaatcagcagcagttggctctgcctcaggaagagttaaagatgctatgaaaaatggaaaataatctgaataaacttattaaaaatgcttataaaaaacttagaacaaaggataaagatcaataaaatagtttcattgggagcgattgcgtttgctgtttttattgtcattgcaggatttttcttcgcttacaggatgattcaggattccagaaaatctatttatattttggataacggcgttccggttcttgccaagcagaccgatgttcttttgaacagacctgtggaatataaagctcagatcgaactattccaccgattgttttttactttggctcctgatgattcctacatcaaagaaaatattcaaaaatcattgtacctcattgatgacagcggcaaaaaagaatataccaacctgagagaaaaaggtttttacaaccaaattgttgcctccagctcaatggtcagtattcataccgattccatctccttggatagagaaaacaataagttccagtttttcggaaagcagatgataaccaggaaatcatctgtcattaccaggaaattatttaccgaaggattttttgaggatatcatccgaagtcccaacaatcctcacggtgtcttactcaaaaactggcgaataatcaataacgaagaactttccaatcaaactaaaaattcttactaaaatgaaaacttttattaaaaacacaggaaagaaatggttgggttggtctgttgaaaatccgaagaaatttttcacgtattctatgatttttttatcagtttctttcctcatatccatactacaaggaattttctttccctccgatttgacattcaaaataaaacctcccattctttattcaaaaagcccggttactcaaaataatcaaacaaaaaatagtaaggaaatggagaagattgtgggtgagttgcagctgctcaaagtaaaaagagatcatggagaattattaaaagaagacagcttacgaatagaatatctgtttaaccaataccaaaactttaaaaatggacattaaaaaaatcaactttaaagacaaaaaatatgttctgccactccttgccttaccatttatatttctgtttgcctatgtaggcgctcagtttatgaaagaggagaaacagaaggaaaaaccaaaagaactttctctttcactgggtgaatcacaggattctataatgaccaaaaatgatgcttatgatgcattttttaaaaaggatgataatcgaacaatgctgggtggacttgacaaggagcaggatagcttacttagttatgaagatcagttatccttatctcagaaaagaaaaatagattcactgaaagctgtcaactcaaggcaaaataaatatcagactaatggaaatctgtcatcatattacaatcctaagcaggagaaagacgatcaggattataaaaggtcttccgagattataaaaatgctgaatgaaaaatcctatggaaaaactgaaaataattatgcagatacgcagaaagaaaagatgcaaagtgtccagccagatccggtaaaatatctgaaacagcagatgttggtaatggattccttggaaaaagcaagagatccggaatatcagaataaactgaatgcagaaaacaaactgaaagccaacaaagagaaaatggaagaatttctgaattctactttcaatgtcagcaaatcgggtattaacggtgattttaatgcagtttataaagaacaggaaaatagatttatcaaggcagttatcgatgaagacaacaaaggatttttaggaagccggattcgattcagattacttgaagacatttttgtcagtaataagaaaatctgcaaaggatcaattctatatggtcagatctctggattttcaatgcagagagttgaccttaaaattatttcagtatttgcaaaaggggagattttgccgattaacctttctatttatgatgtagatggaatgaaaggtttatatgttcctcaaagcgttttcagagatatgattcgtgaaatgggaagtaactccgttcagggaactcagatggatatgggaggagaaggattttttacaaccatcgggtccaaattatttacatccacctccaaatcaatcgccaatttaatcaaaaccaacaaagccaaattgaagtacaattcttatgtatttctgattgacgaaaaacaattgaaagaatctcaaagccaaccaaaaccttaacaaaaatgaaatcaattttatatacactactgttattatttgttgtaaatgttaatgcacaaactgcgaccaagtacaaaataatttctgaattgccggaaatagagatcacagaaggaattaatttgcatataatttctcctgaacctattcagtatgtcgatctatcaagcgaacaaatgacaggagatttgccaacaacgaacattgcaaggattaagattactgatgatcaaaaatccggagaaaagggaatgaaggtaaatcccaatgcatttcttgatagagacaaaatcggaattattacagtggttggacaatctttcattgctcaatataaagcgatctacagtaattcagaaaacttgaataccgttacaaatattcatattcaaccggaagcgatgcagcccattgagtttgacaaaatgatgttttctaatcttgagctgagaaaatttgcaatggatatcattcagaaaaaatctgaaaataatccgattagacttgagaaagatttcaatctgagctttcagcttaataatgtttatgtcatcagcgattatatttttcttgatatgacctttaaaaataactctaacctgagctatgatattgaggctttaaaattctcaatcgaagacaaaaagatacataaagccaccaataatcaaagtattgagatgaccccactttttcagctgaatcctcaaaagcatttcaagaaaaatttccgaaatatttatgtcttcaaaaaattcacttatcctaattccaaagtgatgatgattagattaattgaggaacaactctccggaagaaccattgaaatgaaagtgaattattctgatatcattaaggccgatactttctaatatggagtacaatttaaagctatctaagtctcaagaggaaagacttcttactgaagcaaaatcttttgcaatggatgatgtcggagaatatttactggagaatatcaaggcaatgataagattagaggaaagcgaatccattagaaatttaatggagactcaggagttatctcaggagcaaaaaataatactcaaagaatttggcgaaatctattttaaaaatctttctaaatctaagatattctttcaaaacgaagaacattttgtgatcagactcaaattaaaattacaggaataatgcaagagcaacaacatcaaataaagatctacggctttctacagaaagtagtatatgctgtcgttgcattagattgtgcttcgttgttctacctgaatgctgatgttccagtagtctccaacttattgaagaatttttcaaaagtgagtttcatttatccaccgataaatgcaaagattacaacgttaattcttataggacttgttgccatcggaacaaaggcaaagaaaaagagagaccttaatattgccacggaaattattgttccaatggtctttggtttagcaatgattttttcttcattgaattggcaaaacgaagcgggaagcaacgcgctaccaaagttttttccagggctcaatctgtatcaagtaatctacgctgttctttcttttttaggagcagtaatccttcagatgggtgcagacagcatctcaaaactaatgcagcagaagatgggaaaagaccgatggaatgtggaagaagaatcttttgatcaaaataaagagcttgtaaatacagaaacgtctataaacattccttacagatttcgatataataacaaaacctataatggatatattaatatagacccttttcgaggtacaattgtgattggagttccgggaagcggaaagtcgtttggtgtcattaatccttcaatacgtcagatgattgctaaaggtttttgtctctgtatctacgattttaaatttccagacttagctcagattgcgtatttccattatttgctgaaaaagactaaagattctgattatgattaccattttcatatcatcaatctgaacgaagttgaaaagtcaaggagagtaaacccatttcataagaaatacatccaaacattagcagaagcgcaggaaatggcagaatcaatggtatcatcattacaaaagggtggagcgagttccggaggtggttcagaagctttttttacacaatcagccatcaattttctgtcttcctgcatctacttctttgccacgtttgagagcggaaaatattccgacttacctcatattctatcttttatgaaccgcagttacaaagaaatttttgatactctttttacaaacgaagagattttttctttgctttctccattcaaaacggcgtatgagaataaagcttttgatcagttggaaggacagattggtactttgaaaatttttctttcgcgtttggcaactaaagaaagtttctgggtattctcaggagatgaagtagaattgaaaataactgataaacaaaatccctcgattatgattttggcttcggatcctgcaacacaggatatcaattcagctttgtattcttcgatccttaataggactttacgtctgatcaattctaaacataatttgcccggaggtgttattgctgatgaatttccgacgatttacattcataaaattgacaatatcgtggcaaccgcaagaagtaacaaagttgctgttgtattagggcttcaggaaattccccagcttcgacaattttataaaaaagaggttgcagataccatttctgcaattgtcggaaatattctttcaggttccgcaagagataagaatacattggagtggcttgaaaaattgttcggaaaaattaaacagaaatcctattcacaatctatatcgcagcaaggaacaacgacaagcattaatgagaaaatggactttatgattcctgcgggaaaaattgcagccttgaaaactggagagatggtgggaatgattgcacagggcgaaaaaaatacgactgaagaatataagacctctgccataagagggaaaataaatcttgatatgaaagccattaaggaagaagaacagaattactcggcaatgccgaattactattcattcgtggataagaaaggtatcaaccgaaaagaggaagttctgatgaccaatttcagaaaaatcaataaagaagtggagctcattgtcaaggaaaatatcaaagaataaaattatgaaatcaatcaaaaaatatttgatagctgggatgattttgctttgtcaattattggtttttggacagttcaatactttgactataaaagaaatcaaacccactgaatctatcacagaaatgcgaagagttcaaaaagaaaaacctgccttggaaaaggtgaaagacaatagaaatgtcttcaataaacttttcagtactcctactaaatcgagcctaaaaaaggaacttgattctttgaaaacaatgatgattcgttatagtttgacaagaatagatgatgaaaaattaattccaaaagctgataatgattctctagtgcttataaataaaaaccaatcaatcgagcagtataaaaatgtagaaaaaccgattaaaaaattcagttttatcaaagaagaggattttgtatcaaaaataagtatgcctttggataagaaaattattgttacatccccttacggatggcggttgcatcctattttcagaactggaaaaatgcacaatggaactgatctcaaagccaattatgaaaatgtctatgccgttttagacggtgttgtactagaatccagtaattcaagtggaggcggaaaatatattaaaatcaggcactctgatgcatttgtaacctcttatctacacctttcggaaatatattatgaagtcggagaatatgtaaaagcaggattcattgttgcaaaaagcggaaatagcggaaattccacaggccctcatttacattttgcagttcaggaaaatggcaaatacattaatccaatcaggtttctcaatgatcttatcaatgtgaataatctaatttctgactactatggcacagcaaaaaatacatatagccaacaataaaatacttaccattatgcaaaatcacaatttacctactgatgaactcaaaaattttggaatcatcaatgatgaccttacattttcaaaaaagttaagtccggatgatattgaaaaatttctaaaaggatatactattgttgcagacaatgacaagaacagagcaacttttcaactcactgaagataataccaaactgaaggttatctttcttgagcgagacaaaagccttaataaaattattgaaaacagtaaagaccaagttcaatatgccgatgttaaggaactttcgggtgattatccacttattgaaaagaaagccttcatcttcgataatgagacaggaaaagtggtggagttcgatttcatcaaaaatacgagagagcttacagccattattgcagagaaaaaagagccggaagaactcaaccgctataaaaatgaactgctaaaacttaaaggttttttacaagacaaggctgataaataccctgaaatagccaaggaaatctctaatgatatgaatgttgtatccagagagatagattctgtaaacagcatctcggctgatcaaaaacaaatctcaaaatccggtaattcagatattcagttgaatgtcaatgatcaggatatgtatgaagatgctaacagaaatcgcgaacggcaggaagaagaacaaaccgacgagcgtgagaaaactaggggatttagacggtaatatctaaaattcaattataagttatggaaaatgaattatcctggttcgacagagtgagtactccaaagaccaaagcttacaaagattttgcaaaagaagtagagaatacctctcctgaaatattttacagaaatggagaaaggaagttttctgagcgggagaaaaagtttatgcagattcataaatccacagcaaataaaataatccaaggctctgcatacactttaaatacaatctttaatgttgacactgatacttccgtcaaaactaattataaaagcttagctgaagtagtgcgctttattgataaacaaaagacagatggtagatttttaatcatagaagataatatagccttaaaaaaagtaaccatcgataacgaagcttcaaagcaaaaatttctttcagatgcttgggcaaaggaattggaggtaaggacagacttaagtttagggatggccacttcagaaattgatgaaagacaagcagatcattacaggaaatatgaattttacgaaagagagactgatgtaaaagttggtataatatcaatctatgattacgatggagaaatcgccgatgtaatggattattcgtctgaacaaagttatctaaatgctttgcaaaatgagatagattctaatatagacggcttcaaatatgagacactattaaaaactcctgagcttattaaaaaagtagatgatttaatctatggtgcttacggtgaagagaatccaaattctctcgagacatacaaagaaaagtatagttctgtcaatcattctgacagtcgtgtaaagttagagcaagaaaaacaattagataaaaatcaaaaaaatacaaatcaaacaattaataacaatcaaaatccaaaaattatggaaacacaaaaagaatttgaccaggtaaaataccttaaggaccaaatgaaatatcttggttttggagaagatgaaaaacttcacaaggatttagaaaaaggtatcaaagggaaagcgcagcaatttgaaattaaaacttcttccgataaagcactgcccgaaaacaaggtggattttactttgaagtttagtaaaagtgatcagggaggcgttttcctcaattcttacaatgcaaaattgaccaataataaaaaagaggaaatatcacaaaattttcctgttagtcgggaaaactcttttacagcaaaagaagctgtaaaccttttggaaggacgctgtgtaaaaattgagtttctcaatcctaagagtaatcaaacagagcctgcgtttgttcaatttaattttaatgagcccaaaacggataaaggcaattattatttccaaaatttctataaaaattacggagtggatacagctaaaattgttgaaaaatcgaatctggtatttgataatctggaatggaaagaaaacagcattaaggctttggaaaaaggaaatgttgttaaagttaagatcaaagaaaacgatcaggttgtagaagcaaaagctgttctggatccacagaatagaaatcttaaactgtatgacaacgagatgaatcgaataaataccaataaacctttagaaggcttggaacaagataatagtcacgataaagccaatgttcgggagcagagcattaaacgataaacatctttcttacctataatactacaggaagcggtatttcatcgaaagatttaccgctttttttaaatccaattgatatgaaaattcaactaatactttcaatttttacacttcttttcacattaaattcctgtcacaaggaaattaattcagagcaaggaggtattgatctaatctcgaatgtctatttcgatgcttcaaagggtttggatcagatgcagagctttcatttgtcaaagatgaactattcgcaaaatcagttcatcgaattagttcctgatcataactattcagaggtcaacaaacagatatatttcatccgggattcagtatgttacccaattggagcatcgggaagtaatgtcatattaaaagatatttccgaaagacaaatttctcaatcggtttgggaaaagaagaaaggggctgtcttttcaaaagattggatccccaactacagaaaccgaaaaaacctgtctgatacaattttatttaataaaaaatataaacgttttgagattaattctccttggaattacacccgattttatatttatcgaacagatactattttgccctattcattttacagacacgctgaaaaagattatcacggaagacttgagcgaattgattcttataataaaaagacagacattttcgtaacacttcagttattaccaagaaaaagttgggatgatgaagctaaagaactttttgaatttaatcacttcgtaaacaacagaaaaaaatgaggatggcgggaataaattcttcaatgattaacgagggtatttctgtagtcaatgggactaagaatgagttggttgtttttggaaaagaaaccgatatgctttcatttctggaacttttaaaattaaatgagcaagttaatagcagaagtcttgtaatacttaattctgcgggtaatacaacaggatttctgaatcaatatcaaaattttgatgggaaaatatttctgtgtctggaaggagataggataggagatgcggcaacacttaaaattcttatggaatttaaagaaaagaatattaaggatatccgtaagatgtatgagatttcaaatgaaggaaatatagacttgactgagtatcttaaaaacaaaataaatcatcagaataaaaatagtactttagttgaatccaaaaattcagacaatgcaaaccttaatgttagatcagaaagaatatccaatactcagtacgtgggatcagaaatttctggacgagattctggtagaactttgcaaaacagccaatccaaacaaaagggagatcactcaggaagacatactgttggcagcgcaaatgctggaaatggatctacaggggcagagtggagcaatccaggaaacgaaggaggaagatatgttgatggaatacaaccgcagaatgttgaacaaaatgaagacggacaaaaacatttgggcggaatcatatccgggagaactatatccgatggagtcagaggagaattagacaattctaaaaatattgaggaattagaatttctcatttcaaagtataaaggtcaaaaactgactaatgaccaagttgcagaagtggtttctgcagcttgttttgtttctaaagataataaagtcattattcattcaggtgttgatgtcaccgatgaattaaaaaatatctgtactcactataaaagcggaggtacagcaaaagaaggccgaggaattttagatgagtactacacggattttaagattgttgatgtcatccggaatctaattaaagatcaatataaaaataaaaaagagatttcagttttagaacctagcgttggaactggaaattttctgtatgctgtaaaagaacttggcttaaaaatcaatatttctgcttttgagattaatgaaacaaccgctaaaatttctaaaatccttcatcaagacgctgatgttaatctacgctcttttgaaactgaatttattgacgaaaaaggttttaaacgagattcgaaagaattcgttgaaaagtatgatttggtaattggtaatcctccctacggagaacaccgaggtttatacaaagggctgggagagcaaaccaaaataagcaaatacgaagattattttgttaagcgctctttagattctttaaaaccgaatggagttttggcaatggtgcttccttcgggttggcttaatcgacaaaaaaaattacaaaatgcagaaatttccaatgcttaccgtttaccaataggtgcttttgctggaacacaagtcggaacggatatcatcattctgaaaaaaactttacaaaaaatcacacaggatgtttctaattatttcgaaaataatcctgaaaatattctgggggaaattcgagagaaaagcaatcgttttggacgtatggaaaattatgttcacggtactttagatgaagcatcagccagaatagaacgtcttaggaccaaaaaggaaacggagcgaattggtaatttgtttgaagatttattcttcgagaatacacaagcggaagtaaaagaggaaatttccgctaaaataggcatttcagttcaaactccagctgaacagtatctttccgtagctaaagataaaatagatgacgttctttcaatattgcaagaaatcaaatttaagtctcctgctgttgtaaaagaaattgagaaatacaacgagttaaaagagcaaatcgataaagatgcaaaatccttttctgcagaaaggctaaaggagatttgcgatagatctgaaaagctcatccaatcccagaagaaaattgaatctgagtacagaattcagacaaaacctgagataaaaaaaggtgttttaaaatatcttttttcaaagtcagacgaaattgtcaacacttcattccaaaacagctcagatatttcagcagagcaaatcgctgcttttcgtgatacatattacgacgggacgttgaataatagaggagagcactacaagtttgccaattttattgatgggagatgggtgcacgatttttattatgctgaaggaaatatttactccaaacttgaacagttggaaaaagactttgcagataaatatgccatcgggggaactgaaaaccaatatgagaagcaaaaggaattactattaagtgttctgccaactcccaagtctttggatgaaatttctatcagccctaatcacgaatttgtccacaaatttgcattgggacaagtagagaaagaaaaatataatcattctacaaagcatgttgaaacagttgttgttgattataatcttgcagagaacttcaaagattttgttggcaatttatcaagcgaagctttcgccggttcatcagcttgggaagttcgaagttatgtagacaatgaaacggttacagggagtgataaagaaagaaatgctttagtgcgtgaaagaagaaaggctgcagcaaacgacctttttgaaaagttcattcgtgaagaattgtcagatgaattaagagagaggtttataaaagaattcaatagaaattataataatatccacgttccggactattccaaatttcctctattttccaagattcatctcaattttaaagggaaagaacttagactgaccgaagtacaaaaagcaggaatcggaaggcttacaacaaaaggagttggtctgcttgcacacgaagtgggtttcggaaaaacactttctggaatattttctatgcacgaagcgatggagcgtggaaattctaaaaggccattgattgttgtgcccaatgacagtattttaaaacagtgggtcgaaacaatatttgaaacaattccgaatgcgaaagtgaatgtcttgggaaatcttggaaaggattatgatctttctcgatttgataacagagatggagaaatcacaattgttacttatgaaggttttaataatatcggtttctccgaaaatattactcaagatttggcttccaagttttcttacatttcagagagtgaattgcgtagtgttaattccatcagcgaaagggattttcagaaagaattagaaaaagaaaaagagttgcagggaaaaatgaagcgcggcaaaatctatgattgggaagattttggttttgatcatttgacttttgatgaagttcataatgccaatcacattgttggaaaggtcagaatcgaggatcgaagatttgcttccgattttagaagtcaaaatcaacagacttccagattaggaattaatacatggatggcttcccaatatattcagggcaaatatgatggtagaaatgttacgcttctatcagcaacaccttttaccaataaacctcttgagtattattcggtgttgtctttgattgcgaataagcgtcttgaagaatccggatattttaatgtcaatacctttttcgaaacttttatggaggcggataatgatatggaaattgatgcgaaaggagatgtaaagttcaaagctaatgtacggaggtttaaaaataattctttgtttcaacagctcctatctgagtttattgatattaaaggagaagaagataatcctgaattaatccgcccaacgaagattaataaagaatataaaattgagcagaatgacttaactcaggaacaatatgatttactcacggagaatttcgacgattctcaaaaaggagcaattcttactcatatcctcaatgctcggcttatcgctatttctccgtatctgtctccctactatgacggagaaattccttctgtaaaagaatttattgagaattctccaaaactgattgagacgatgaaactgatacagcagaataagaaagatatgcctgattccggtcagatcttatattcagaattagcagtctctgaatttccgaaaataaaagattatcttattacggaaatcagttacaaacctaatgaaattggagtcattactggtgcaacgagcaagcctaacagactaaaaattcaagatgattttaattccggtaaagtcaaaatcattctcggcagcgaagctattcaggaaggaatgaatcttcagcaaaatactagtgacttatatatgctctctcttccctacaattttacaactttacgacaggtcgaaggtcgtgcctggagacaaggaaacaagcacgagaatgtgagagtcaattttatgcttaccaatgatagcatcgatgtgtttatgcttcagaagcttcaatcaaaacaagcaagatatttggaagcaatgaaaaagggagcgaatgttttggatatttcagatatcagtacgcaggaactcaaaacatccattataacaaatccggaaacaagagcaaatattgaaattgaactgttgaagagaagaattgaaagtgagaaaaatcaacatctagctgataatgcatttgttttgcggaaatatgagaattttttaaaagtgcaggaaatggttactaaagcgcagcattcctataacagaattttaggttattctaaggatgaaactgaaaatgctggatattggaaaaatcaacttccttcttatcagaaaacaattgatttggctaaagctgaagttcagaaaactatcgaatacttagctgaaaaaggtgtgaatgttacagaaatagaatttcagactaaaaatatggaagagaaaattactatgctggataaaaaattagaagaacttcctgaaattgaagtgaatttgattggactatataataaagaaagagaggaaaggttaaagttgaatcaaaatattgataatataaaaaatagattagaagagaattctaaattatttaatttgagaaatggagaggaaatccaagaaaataataacaatagaactaacagggagattgttggtaaggtagaaaatgaggaacaaaataataatattgtattgcgaaagaggtaattatttaattttttatgcattttaaatttactattagaaatagtttggaatggtttccgaataaatttctacagtaaaatccacttatttaaccaaaatctctgaaatccttttccattccatcccatttaagctagagtttcttgggcttaaattatcccaatctgtatttgttaaatcacgaaccctcttccttaaagttgtgtaggaatattcatttatacctctttcgattaaatcttcaaaagaaaatgcaagtgctcttggaacaccaatcattctaaacgctaatgatttttcattgtcaactccaaagtagactagagacggaatatgagaatcttgtatatctgtatttccttttactattccttctaatgcacttaatccccaagatgccttaaatctgatatcattcattttttttacaaattcggtgatacgatcctcagtctctttctcgtctgtgttttgaatattatatattggatggatattagcaatatttgataatttatcaccctttacccaatcgattattattttggcgtacaattccggattaaattgactttgggcatctactcctaattttgtctcttttaaagcagcaattacttttattttctcagttaagttttgtgggtttccactatcaaaaagctgttcttttgaccagcttgataaatcactgatttctgtatttgttcgagcttgtctcattacattgataacagaaggtacagagaaacctgttttatcagcaaaagccagtacacctttgtcactatatctagattgtaaagtcaagtagatcgatttacagatagatatgaatttttgtctcttctcttgagtgtctaaaagatagtattctaaagagtccttgaaaagatcttcaatttcagttacataatattcattccctccaacagttagaagatgtacaaaatattgaattagtggtgaaagtgaattagaatagtccctgaacaagtcataaaatccagtaggttctttaagcttttgttcaatataatctgcattttcaaatagttctgctaaaacacttgttaaagtatttgcactattacgaattagatctttagcattatctacattagccttgctgttaaaaggcataattattttaccgtaattgtcaacaagtgtcctgcctgctcttcctgctatgttccaaaagtcatttgaatctaatttgttatactgacctcttctgtaatcatcaaaaaaaactgatgaaaccggaaaatttactccctcagctattgtggtagttgcacatacatattgtatgtgcttttctctgattaaatgctcaaccaaaagctttgtttcatcggacataccaccatgatgtgtaacaattcctttgtcgatgactttggataaggtagtttgacgtccaacttcgtcttcaatgaattttttaactagtttaacatcatcacttgagttatatttttgaaccttatcataaatgaaatcagctctactatttgcagttccttttccataacaaagaattaacattgtcttttcctcctctgaaaaatggtttactgaaaattcaagaattctgtctttttttccggaactttctaacgtatatggattttgaatgatagttttttcaataggtctgactgaatcataaggcgttttgagaacttctaaatgaatttcatttttggtaatggttttctttacatcaatacctaagataagtttttcggaaggtttccagtcaacatatatcgaattacctccaccaagccattcagtaattactgcatttgcattttgaataaatggtgatagcagcatatattttgcattaggacgttctcttcttaaaatagctaacagtaattctaatttcgctcctctttctccattctgaatggtatgagcttcatcaatgataaacatagaaacatcatcaacagatggatgtcttcttcttatcaaaagatctaatttttcaggtgttgaaattaaaacatctattttttcgtcaccactcaagaaagagtcttccgttgggtctacttcaatagcagaagaagttttctcgatggcaaatcctagttcttcaaggtctgattttagatcataatagacttggtttacaagagctctagatggaacgacgtaaacaatctttgcgtctgctcttaaagcttttgtaataataatattaaattctgctaacagagttttaccggcacttgttggcatctgtaaaacagttacattggcggcaacgtctaaaaggttttcagtcattgcctttctttgagaaggtaacaactcaagcatgcctgtttcagccttgattctgcaaagctctctaattttatcgttaaatttagtattagtccaaatcgcatttttatgaattgcatttagaccaaattcaaatatttgaaatatacctagcaagcgcggttcattaatagccgcttttttagcaatgtctaaatgctgtctgattactgaatctatacgttccctatattcatagcccttcactaagtaagtcgcagtttcgactaatgcttttgtaagatgatataatgacaatagaagatacgcttcatttacttcgtctctagctgtaaactgttgtaagtatccttcttcgtatgcttgttgttgatttcttaaattatcaattatagaaagcgcctcttcaatatccttgaaaccgtttttcttacgaactaaaagaagataggcttccattgtctcattaatcaatttaaacttccaatcttcggtttggtaatttgaagttttaaattctttaagatcaattcttatattgatgtttttttctgcttttaatgcaatattagataaatagaaataatataatattgttttatcaataccttcaaatccgaatgcattttgaaaatcattggcatcattctccgattcaatgtttattgattttaaaagtttataagcaatattactttctgaaatcaaatcttcctcttcagaaaaaatattatttgtaatgaaaaaggtcaatcggatgatttccgaattatttaaattcgattctataggtagttttaattgatcaaaaatgtacaatttctcactttcacttaaaagtgaaagtatagattcttgctgcattatggcattgacaatattcttcatcaattatgaaatcaattgttgtactttttcataaaacattttaactgtttcttcaatggttttatctttaaatgataaaattgaaaaatgaacttttccaggttcaaaatttacttgttcggacttcatttttccaaaatccgaatcttcattaacacattcaaaatcgcgtattaaggtacaaccatatgtaatgtcaattttatcttcgaatttatgttcaagacaaattattgcaaagccaattatttccgcatccttaatattcaatctccttgcatagtctgataatcgctgtataacaacaggggtatcatttttatgatttgtatgggtattaaatattgaatccgaagaagtatcaacaaccgatggtggtgtttttttatcctgtgaaactttagcctctcctaaaagaatttctattttattatcagaagtttccttatagccgattgcatccaatcctctaccaggcatatcatacctttctctgaaagttatatttttcaatggtataataaatctctcaccttcagcaattttttcttcaaaataataggtcattaataattcccccagatcactgcggtaaatatcttggagaacagctggcttgagcccttcctctctctttttatcaagaggaacggaattttttttaattatttgttggagtacatctgttccaaatcctaaattcccaaacaaagtttgttcaccgatatcactataattaaacaaagttgtacttctttgctctaaatacttttgcgcaaatttttcaataaaattatcggcaactttgatatctaattttttatgtatatgcataattttaggatttgcaaatttactatttatccaccgattttttctttaaaaatacgttaaaaaaatgatgtggattcagtgtttataacataatgtttttaattttaattaatttccgacttaattaaatgaactaaaagtgtctttgagatatacaaatgatgtcagacatgagaaaaaatctttcgaatgtatttttcttttatgttctatctgaattttttttgtcatcaaatcatggtagatccctaagtatgagactgaagatatctgttcagcctcaaatcctttaaacaacgtctcaaaatgaggtgtgccaaaggctcgcttattttcctttgagctatcaatagctttcataagattatggattatatacccgatattcggatcatctcctggatcagtaaaatctcccacacttaaaaagtccttttcccaataagcatccattttaagactaccttcgtcaagatcagcttctgtaggttcatagaatcttaattcatccgttttaaagtctacatcataatagttggtatttacgaaccctcccatttttataacgtcatcgaatggtaattctttatattgctgcagggcctccttcaacatcttacgatgtaaatgacctttgtaagggttataaatacatagagtaaaaccatgtggataaggagcaccatggtaggcgttgtgaaatattacaaacccgtttatattttggcgattaaatatggttgttatataatttataaatccatctttatttttgacttcagatattgtaaaatattcaaaagtatcaaaacattcataagagaataagtttctataatcttcttcttttacatctttaattggattgataatttttaattttaaattttggatcttttcctctttaactgtaaaatctaggtgaagtggtaaagcttgaatattattccataacattgaatattctattgctgatcgtggtgtgactctccattcggttgaaatgggaatccatataacttgtaaattagataatccctgaaatctgtgttgtaaaccaagattatatgctgaaagctctgtgacggcttcacgttcagtgcctcgacttgttttaagctctataagtgctaagtttagactctcagtgttataagctaaaatgtcaaccgatggttgttttccggtttttgaacctgtttttaaaaggggaaattcagagtcaattaatttgtagtattctatatttcttgtggagtatgatactttatcaactaaaattaacttaacaagatctgaaatcttgatagatgacatacaatcaaaaatttctttcttctgcttttttatctcattgttatattcctcaatgttagatatttttttatggaaagtattaaaattttcacagagataatcttgcactttactttctatcatggttttatttattaataaatatatacatttaatttttgttttttagtaatttatgagtaatttttacgcttatttattttgtatttatgataaagttttttgaagattttgaatgtgacgatgacgaactggtcacaggttatgactggataaggggctttttgtctacaaaagactggatgacgaaaaaagacaacattgaaaattgtttactcgaaaaactaaggcctgttgatccttcgaaaaatattgccgaaagtaagcgtcttttaattgaggatgataaaattggctggtatttgtacttagcttatacatatatttatgagagacataagtataattatttctcaggtgctcgtgttttaccgatttttaaacagattggaaaatatataaatgttgttaaaaatattccagggattgacaaaaagattagagatatgcttaggaaaaggcctaatgaggctgatgcaatcttatttgaaatcctaacagctttattatggagcagaaatggttattcggttgagataataaatgaaaatcaaggggctctcggtaagaatccagattttcttgcaataaaaggagatgaaagttgggaagtggaatgcaagagattaggtccttcagaatatacaggcagggagacagtgaagaagcttaaaatgatcaatgaagtgaaggatctactaacaaaaaataatattttgttatacgttgatattcatacggaagtatttaacctttccgactcgttccttaaagatcaattagaagacctgattctgacaattgaatacgaagaaaaacatttggctttacctgaagctgatttaagaatttctaagattgatgttggaaaaataaacaatcatttaaagacgcattttgttaaaaatcactcaccccagctcttagagttaatagcaggaaaacctgtagatcatcaagggtttacttgtggtttagatgcaaagttccaatatgtggaaggcaatttacttagtcaatatttggataaggttagaaatgtttttggactctattttaattgtgatgcgcaagagtcaattgctgcaaaggcaaaggatgctggaagactaataaaaaaagctattaagcagtttcacggtgtgactggtggtgtaattcacgtaggtatagaaactatggacggtccgctagttgaaaagatgaggacagagaaggttttgaaaacctgggaacatttagatacaaatgaaactgcacttagttggattttttatcattattttcagtcctattcacgttcttatagcgaatggtcttttgatgaaacagtaaattctgctactaacttagtatatcccgaaaatccaattcctatccatttcttagttgttcctgaagaggaagtaacaattgtagatggttcacattgggaaagagaagcgccttaagatatcttaaacataaaactaaataacgacttggaaaaagtattttaagttatgagaattattcatctgtctgatatacacttgtctaaagaaaatattgaaaattttaggctttactacagaggagctttaattaatgagctaaggcataaaaattctgaaattgatattgatttaatcattatatcgggtgaccttgtagataaaggtggtgcatctttgaaaatggtaacaccctatgaagattttgaaaatccttttgatattttcgaaatcgaatttattgagcctttatgtaacgaaattggaataaaaaaagaaaaagtactttttattcctggaaatcatgatattgaacaaaacaaaatcgatgaagttaaagaagctggaattaaagcacttttgaaatccccgcaagatgtggataggctatgtggaaagtatctgaaaaattttcaaggtttaaattttgaaaggctggacgcctttttagaatttgagcagagattccataataaagatgaggatcagcattatgaattttcaacgcttgaatcaaaagtgatctacgattataattcaagaaaagtaggaattgctctgataaatgattcttggcgctgtgcatctgggagagtagagaatcattttgtgggatcacatcaatttcatagatcaatccaattttttgagaagtatggaaccgaactaaatattgctgttatgcatcatccattggaatgttataatcccgaggaaaaaaatgaaattgaaaacctcctacattttaaaaaattcgaaatgttgctcttgggtcatgaacataataaacatttcagaggtagtgattttggaaatgaccaaaagattctgttttcaagaggacggtctgcatttgataagccgcacgaaaaagaatcaaaatacatatctggttatgctataatagatattgatttttcgaataaaaacataaaatgtaattataaaatctatgatgagggttcttcaaaattttatgatgatgttcttggtggggatgctgtcaggacatataagtatggaattgcagaggaagttaaagaaaagtttaatatgaaagaaaaagacttctttatgggaatcgataaaagtcaatttaaaaataacccgggcaatgaataatatatattacgaacaaaggtttattaagaactctaaagacgctacagaaattcagactattgaaagtaagaataaaacaaagcttgctgatgtcttattgaaagatggaaggatcgtgttactggggaatccaggaatagggaaatcaactgaactcaatatgctattcgaaaatctttgggaaaatagggaagatagtatgaatttcccattaattataaatttaaaaagtttccgccctgtttcaagatttgaggacttaattccattgaaggaatggaaggagcttccaaaaatgacttttattttagatgggctagatgaaattgcggatattcaagattttgtttctgaattagagaattttttgaataaaaatgatgacaagataattaatgttgttttaagctgcagaaccaatatatatgagaagtatttaataaatatttcaggattcaaatattattttttagatggattgactgataaacaaataaataacattcttgaaaagcgaatatttacaaagttaggaattgaagaacttgataaattcagagtctatctggaaactccttttaatcttgagcctttttgtgaatactatgaaagtaaaaaggcatttcctgaaacccaggaagaatgttggaatcttttcattgaaaatgaattaaggaaattgagcaaagacaagcttaagaaaagagaaaatgtggatattgcccatgtaaaaaaatgtctggaaaaagttgctttagtgagtgaatcaatgcatcagaattatatttcagatgatcatgtttacagtcttttaggaaaggatgataaatcaatatttgaacagatttctttagttgaaaaattacctaaaactgataattttgtttttaggcatagaaactatcaagaatttttttctgccaaactattgtcagaatttacgccagatgaaattatttctttaataagaattcatccggaagaaaatataactaagccttcgttttttaacacaattacttttttacttaatataattgaacctaaaaaatttatagagcttgagaaatggtttttagctaatgagcccgaaatactttttttagcggaaaaagataaattacctgtatcaacccaaaaggaaattttcaagaaatatttccaagaaatttctgttgaaaagacattttggtttggaaaagatagaaggttttcaattgataaaattgccgaatttgcagatatagattttttgttaggaattgttagagaaaataatcacttcagaagtgttatttcagcgttggacgttctatcttttactaaaaatactggtaaggaacttgagattaaacagatttttacagattatatttttgcaggtgatagatacatggaggtggctctgagatcttttaggggtaaaggttttcacaagtttgataaagaactttttttaagtatttctgagcattttaaaaacgatttttctcctgaaataaaccaccagcttatagcaatgattgctgattttgaatttgtagatgaatatttttctgttttaaaaaattgtgttgataaactttacgaagttagaccggaacaaattaaggataatactattcgtggtacgaaatggttgttggagaaaattttcttaaagattgaaaatgctgagaattttctatcggtactagatgtaatatttaatgaaaagtttgatattaaaatttctgatttttatgataaaaaatttagagataagttgattgaaagaattttatatttttcagaaaaggaaactgactttctcttaagatgtatcgatgcatttttaagacatgaggatagttttatatatagaagagatagtattatagttgatgtgataaataggtcgtcaaaagattttagagcatttaaatacatcataaataaatatggattgtcggacaaaaattatatgtttttaagtttttttgacaataagcaatgcattgattatttggttgaaaaatatgaaaacaaagaaatatttatagaaaaggaaactgatttagattttttaagatacaagtacttttataccaattacgaattaggctattattatgaaaaactctttaaagatgcggggtataaatttccggaagacttgcctaccgaaaaggagatcatgcttgaaaataaaagaaagaaagaatttgttcaaagcaattttgatattctttttgatagggaagaattagctgctgaagtctctaaagtttttgataataactctataattgatatgacttggaaaaatattcatgagattgaatgggagtggtataaaaataaaaatgagcacggagttcaacattctgttttcagggcgatttctgcttcagtgaaaaatagcgagaaaaaaacgaaagaagatgttattgcacatataagtaatgattatttcattatttttcaaataaaaaataaaattaaagacagagaaaatgaaggttttacagttaaagaggatcagatttcttacataaaacaattgtgtaaaaaatttgcagacgaatttaattttaatcgtgtaattaatgtaaagagtgatggaaacttaggtatttacaatggatatagtattttaaaattacttttttactttgacaagaagtatgatatccagtattcaacagatttttatcttcgatcattgaaatattgtaatattttcggtagcgctgaaggtaatacagatttcataaaatcaagaattagtaatccagatctttttaaaaatcaacttattgagaatttaaaaaaagaagtattagattcaggatctttaaaagatcatattgaccaggcaattgaactaaaattggaggagacttatccaatattggaggataattttctaaatgataattatatctactctcaaagagattttctctcgcgatacactgaactattaaataaggatcaagaaattacatttttagaaaagtgctgcaataatattgattcttatttatgctggaaggcagttgaagtatttattgaaaaaaaattgcatagtacctttattctggaaattgccagaaaacatttggaaaaagagaatcctaagtttgtttcagatgcacttaacgtactattttattgtaatgatgaaagtgcgttacctctatatctaaaatttcttatcgattttaaaaatactgaacgagtagactacagggatgattaccgaataaaagattttgcaaattataagagattagattctatattagttctgaaggatatttttaaaattgtttatgacgaaaatgtaaaggatacctttgatttttataattctcagaatttactgaaagtactaattaataatttatcagaaacagaggtaggttacaaaaaagtacgggcaatgcttacaaatttaaaatctgaaattatgaataatgacaataagtttttttatgttaataatttaattgaagattctaaattgtcatactatgcttctatctcacgtccatttacatttaaggaagcaaaaatttttttagaggaaattgaaagcatttagataaaaaaagagatatagatgggacggtggtaataaattaagaagtgtttggataaacttatttttaaaggagaagataattatatatgcatacgaatcaaatatctcttgatgggggaatgacatatgcggaaacaaatatggcttagtttttttccgagccatttaatgcgattactgcaatgttttttgtagctatagctgttttttggacaattaaaataaaaggtaatttgggtaatggttcaggtatggagttaattaaaaactccatatctaaaccattaccctgtaattttgattcttaaataaatacttaaattgtaggatctatttcctcaccgatcttatcaagatatgtttgcaaattgatagctggtactgttcctatagcttgctgaagatatcgtgtcagctgcataaagaatgttaccaatgaattttctggcttactaaaagttagctctttgaatgttcttgaattgtagtagtcatgatagcgtttctcaaaatcaatttcgtttctcaagctgatatcctcttcaccatcatagtcaattgagaagcttccgtaatcagctatacaaccaaagtctatggttttaaaacctgtttgagcttttagatgtttttctatggttgaggtttgcttgatagtattggtgctagttaatattcctcccaaaattttggttaaaggtcttgccggaaccactgctccggaattaatcatttgtgttgtagttcgttttaggactctaacactttcaattttttctgctgcatactcaatatagcttttaccatctactgttcccttaagatccggcttaacttcaaatactgcgtatacgccttctgctggtatgtaatgaaagccattctgcgaaaatataaaaggagtaaaccaattatcatagattacgatgtcgatctgatgactggtatttccttcatgatcaataacaattgctttatctacgctatatcgattgggtaaatatttactcaaccattcgatccaagcattttccaatgaatctcctttagatcctggatgattaatgaattctctattggtgctaagttgtgaaatcatttggctttgaagaccattgaataacattttaagatcaatttttttactcatatgcaaatagttttttttctgagtaatagtaaaaagtaaaattttgcattttctttttactaatacttataattaatagtaatgggtttttgatttggactccatcggattctgctgtttcagtcatggcattgagatcagttccgctgtacatcgttgaaccatcaggatgagaatgccattcgccaatataatatctgctgttttcctgatattcttttataaaaagtttttcaagatctttggtagacctctgaaataggacaggagatgctttgtatttataaggtagaataatagattctataactacagatttaaaatcttcagaatattttcccagtaggaaacctccaaactcgttaggataatgttgaacagcaatcgtttcaatttcctttagtagagattcttccagtacgatctctaaattgttatgcgtatttttaagtatcaatattctataatttttaaggaattgttattttcctggataacgaaattgttgaatgctttctctcccgagaaaattctattgatttgtttaaaagccatttgaaccaataatgcaatatcgttataagatgctttgaatgtcggactccaacaacccgtcggttcgtacatgtcatccacatcgttttcgagaacgttcgagaactgattgtttacaaaattgtagatgtttggataaaaggcacaaactaactcgttagcatgattagttaacgatatattgataagctttgagcgaagcgttagtttgtttaatacgtacatcaaatcattgtcggttgaacagtcaaaaataatatcgtatttatccagatctgacgtaatgtaggctcgtaaattttcatctgtataaaatgatttgatatacttttcgaagtagtcattattaatttgatgggaagttacaaaaggtgagatctcataaagtgagcctgctaactcaagaatcttattattgattccttttgaaaagcgatattctgatctacagacattttcaggctctttaatatcatgatcaatgaagtcaataaacctgcaccctgaccttgttaacgtcgttgcaatcatgctaccaacagctcctacacctataataagaatttttgcttccgtaatagaatcacaaaatttaccgcgtccaaaaaaatattcgtatgacgcatttctggaaataccccagtgaatgggcgcatcaacaatgccagtatgccatctacccgttttccttccttcatttcgctcaggaacacccttaatcggaaattttcccacttccattaacgctacctgccaatgaacttccgtgctgttaattttatatccaagaaaaaacgggatcacctttccgtaatcttctttagcacacttttcctcaaattcatgaagcatggttagaatatcttgagggagatcaagctcggcccaagtggaatgggcaaatcgattatattttgcaggcggattttctcggaaaagataaattccttcccggtctgtaggttgctcaaaataaaaatcgttccaggaacatttcttctttaaatcaggaaatgtctcaaagtattttacgtaaaaattataaatgtgatcttttttgtgatatccatcatgcagtaaagacaattttacaattcctatttctccctcttgaaatactttacccgttgatgtgaaagtaaatgaatatttatcacctttaactgcagagtcttgtacaaccagatgttcatatttttggtctgtctccttgttaatgtagtacttaataatccatgccttcagagcattaaagtcaatccaaatcttattctcaagatcttcactatgtgcagtatgtatacatatgtttccgtttgccattacgtgattgtactgaatcaaatcagaattaaaaaatgtaatggattcggaactatatgtttttaaagggtattcctgagttattaaaaaatcaaacaataatggattttccagttcttcaaaagcaatttctatattaccactaataaagaattccccttgttctatgcgattgattttgcttacaaagggaatttctgatattgcggattttattttttctaacctcactctatccaaaacgctgatcatcttttggtatggaaagtcctgaagatcctttcagtccatatgattctgttgtatcaaaatctttattggctggaaaatatgttttgatgttttcagaattttcagttatcctatcaattatattcttcattttgttagataaattctggcgatcaaaccaactgaggtttttcatcaagtcattacttgggttgccaggatcttttaatgtgaagtcctcacgagttacattatcttttatgtaccttaatacgccttccgttttgtcccataaatttcctgtaattgttgacttatcaaatgcttttaacgtaaaaagctccatcaaaaaggatttgtaggattcgctgttagagtgcttccagatttttaataaccttattatttttctttcgtcgtctcttgatttaatggtgtctatttgtgactgaatatttgttttcatgtaggtacctttgctgaatccccaggtatccttattgaaataaatattcagatcccgtacgtctaaataggaatctacgctgatttctcttcccggaacaacatcaatgctgatctggtctccatctttatcagctttgaaaattacaccaatagaaaccttttgcttccttaccgttgcaagtccagtatcctcatatttctcatataagaaatcataaactgcattgtacatttcttcaatcgtagtaaaactgtttctcttgaacggaacaacaacatctaaatcgaattttatgttgattgctgtatgctttccgaaagaacctgaatttaaaggactataaatatcagaagtgtaatgttcctccagtgcttcttttatatcatcccttttatctctgaatttttgcactaacttatcaatatgactcatgcgatgagtctccagtacattagccaaatgttcacttctgttaactgccataaaatgtttatatttttaatgttgaatttctcaaatctagtaccgattagaatttctgatatgatttatgtcatatgtcgtcgctttctgacatcatgtcggataataagctgtaaaatgttatttatcaaacaattgtttagcattttttgtcacataagaaggagtatgttgcaagaacaataacataatcaattataactttgaatttagtttatcaagaaatattggaatcacatttcggaatttcaaaaaactctttggtcagcaaaaccatttttaaagtgatccaccatacataaactccataatgataactttctgcaggtgatgcaagaccatggcaaattttatagcggaagtttgcgctgttaccatcaatcaaaaaactgtttaattcagataaaagatctttgttgcagagtccatccagcatattgccagattctttcaaagaaagaagggagcccaaagtattatcatgctgaacagcttcatcaagtttaatcgtattcctaccatttttttcgacgatgttcttcagacagttttcgatttgaggaattaagagatgccctgctgtcataaagttgttctgaaaacccaagtagagtccttcaagaaaaaatgcttcacgaccttctggaataaatggacttctttcggtcattaaaaaactggcaagagcattcttggacattgaatgcttctggatcattctatctgtaatcttaatgactaaatcaatgataacatttcgacaatggtccctagctaaattaatatagaactgtttttcatctgtggagccacttattgtacctttaccagtgatatgaacatatttgtcgaagaattgtccaaaagatgaattgggattattgtctgaccatacagatagatttttctcatccaaaattggaagatgtagtaatgctgttagcccactttggaaatcaacaatttctaaactatcaagccattgtgtataatcagattctaatttagtacttattgtcatctttttgagtagttcataaaaacctttttgttcattttttattttctcagaaagtcgattctttaaaactgtctgatcagcaattccttttatttcttttagtgcttccgtgtataagtcaagaatggttgggtaataagttctttcttttttttccgaggtaagtaagtctccttctttttcaagatagagagcattttgtatcctcatatcattgttggtaaagtgttttaatttatttaaaatcttaatctgccattttattgcactataattgttttcactttcatgcttgcttaaaagccttaaagaaatattggtaagtaaatgctttgaatgattctcaagcaaaaattctgacgtactgaccagtgagaattgataataagaagaatctaaattactaaaaatagtaatggttttttcttcaaaatcaactaacctatctttaaatatggattttacttttctgatcaattccaatgatcgcaaaaagtagtttaattcctgtgtcttatgatacaattcttcataaaggccaatagcttttttaatactgttgattttatcatcaccaccactgacaaaattgaaatcatgtaatctggctaaaatctctttgttatcagtttttatcgttgggatagtgaaatctttatcgtcagtaaaaattttaaaagactcgccgtttattggactccttacaagcgaaagtaatttttttatttcctgatcttccggaaacaattgagcgatgcggtaaagttcactacataattctcttgagtatatattttcaggtatttgataatcgttggacattttctattgtttttaaatacaagaagattgcattttgtactcaattttagcctatagcccttttgggttagttgtttaattgtaaaattaaaaagataaatgtgatagaaattacggtaagccgtaaggattttatttgctttctattatggcaattagctctttcaattgtttgtcgtaaatagtagtaaagtccttgataaaattagtagtctgaatatctaaagactcaagcttcactcttacgtccttatctatttctataaataattcttcaaagtttaaattttttaggctatcaaagtttttcttttttaatttcttatgaaattcatagaagtgattctcaatttcagatgttttcccaagtagtccatacctttggagagtggtatttagattcttttggtcgcattgaccataatccagcatacatagggcaagatgttcatcggaatcggttaataacagttggaataaacagccaaaataattgttgctaaagttatgagccagtctgtcaggcgacatccttgcactatttttataacctggtgggggtagtggtacaataaagcctttaaaaccatttttgcattcagcgcaaggctggatttgtagatccataattttaaaaccttcaatttcttttgtactctgcttatacgctataaagtgacccagttcatgaaaaaaaatggtcttaatcttctcaaagtttttttctaaaaaattcatattcaatgtcggatgaaggtcatgttaaaggttgagtttctaaccaattctattctttattagtaaaataactttatcaaaaaaaattgtattatgaaatttgttgaatactctgcagatgagtaaatcaacaactatcaatccgcaatagataattttatgaaaaattaattctcacttttggggctcaaatgttccaaactaaagtaataaaaatcatttctgatattatctcttgtctgtctgtttttaacaataacaggcatcttatgtcttcttgctagttcagccacaggttttttattggaataaaatttttgaagtaaattttctgttactgacatatcttggttaggatcttcaatataataatgatctatttctattttagctgtagatctctctaaataaaataaatgattctccaaagttcgtctttctaactttgggttgtcgtcaattctgaaatattcagagtgcagaatgtcaacatttctcctatctaaagctaatattaactcattaaaaaactgatctgcatttgcttctgtttttgaagtaaatgtagttgcaaaatgcaccgatgcatcaaaacttatatcaataaatctcacatctaaataaaacttcatggcttaaattttttatagtacaattttcatttttaagactatttaacgctccaaaaaatgatagaaaagcaaaattacaataaatactcatcatttccattacgggtttttacggtatttataagcagatttgtttgatgaatttttatataaaaagaatagtatacttttgtaacttctaaaaataaaaaatgagaattaaaagttccaaacaaaaaaaatctcattttacataaaattttgtaatggcaatttctgaaagaacgaggaaaatactttgggcaaaatcaggtaacacatgcgctatatgccgtactgaacttataagagaaactgacaaatcatccgataacattgttgtgggacaggaatgtcatattgtatccgaaaaaagtaaaggaccaagggcaaatcctgattttgaaggtaattatgatggccacgaaaacatattgttattatgtgcaaatcatcatatagaagttgattctttgacggagtattatactgcaggtagattaaagcaaataaaattaagtcatgaaacttgggtaaagactacgttgcaaaagaaaccggattcattttcgaatgacaaattgaacattaagagtttatctagaataatcactggaaaaaacttattagaaattattaatcatgctgacgtgtttgattttaatcatgatgacttaaactctgaaagtgaagccgatctaataggcaattttctagaagagttacaagattacggagatataatatctgatttaagtttttctgagcgagcaaaagtagttttacattttgatgaaaaaataaatgaactatcaagaaatggattttacattttcggattacgtcgtcaagtaaatctctttaacagagattatgagagtttaggtctttttgatggagcgtctgttattattgcacgaataaatcatcctggaatatttgataatcatataattgcgcaatttcctacggtatcacgttttgcataaaatcacatattgtataccgaataagatttaaattcgctgtggttataaattacaggattttatcttaaaattgtctaataatctttttcaaatgctcagtattgaaatcttgctctcggaaaaatggctcattattgagctttgaaattttcttaatctcagctataaataaaatagatatctgcctaaaagttacttctcagaaactgatagtttattttaaatctttcattaagaaataatcttcattaatttttaaaaaaattgactcaatacttttttcgatattttgaacaattaaatttgtaaatggatcatttctatcgtgcaatggaaatagttcttctaatttattgtacaacaaatttttatcgttgtgtttttttttctatttctaacaacatatttagaatatgatgagaactgattaatgtaaaattgcttttgccagcaactttttgcatttcctctaaagcttctattatcttaaactctttaaaaaatgttgtgtaaaattgttcaaaagcataaagagtatccctttcatatatttcgaaaaagctaccaacaatgtaagcaaaaggtgatctagaaaaaggattaacttttcttagaactgcgtttccttcacagaccgctaaatatatacttaagttattcttgtataaaatattgattttttcaaaatatggtaatatttcagaccaatcaacttcctcaccactttgaagttctaaaccattgttatctccatgtacttcaaaatgtaagaaataaaatttatttctatttttagcattatcatataataaatccagtgttttaaaaaatgaatatttgtctgcaacttcaaaatactcattttcaatgaattgtttttcgaattttatgtattttaaagttgtctcgaatagttctcttcctgttcttttatccgactttctaagtgactcgataattgccactccaatttcttgtgctgtgatcatatttagataattttaacttttggtacatttaaatatataaatatcaaaatttatttttgaagaattagaaaatttagtaaatgaacaaaaaaaggaactgttgaagataaagaagaactacctttaaaataaatgatacttatttgtagtttcaagaactttatgataatttatttcttttttttaatgtttcaagaatatttttatatttgataatgtgatgtatatgattgatttaatcgaaaaattgtaaatttatttgtaaaaattaaaaaaacacatatctttgcacaagtaaaaacaaacactcttaatcttgtttagaatagtgacctattcagtggccttcacaacaagaaaatagtataaagcttatggataggggatttttactaaatgtacaagtcccgtccggatcgcggagaatctttcagatttcatcaaaaccccttaaaacatatgttttaaggggttttttatttgggtaaccgtcaaattatataaataaatgcatattaaaaggggcgaattcgggaccaatttttaaggaaagttattttggtccctctaatataggagaaaataattcacacttatgttttagtagacatgtcaaaagaggagaattttggaagtcttggtaaaattggtcccgaattaagggggaattggtcccgaatagcagaataaatggtcccgaattaaggaggtttctaataaatattcttaccaaaaattgataaaaatatttattcatttagtataatatattctcttttgtaggattattagctgcaatgttaaaaatggtcccgaatttaggcgtaattggtcccgagtgacaaattaaatggtccccgaacttagctgctgtttaatataaattttataaggtcaagataagtgaatcaaatttaatttgtaaatatttattcatttgtaagtgaagtaggtgtccaaaattgaaaatggtcccgaattaagaaaaaataggacacctaaatcctctagaagtccttttgtaaaaggcttcttttgattcgttatgttttgtagataaaaagtttaaagtaattttttaatcatcaaaaatataattatgagtacttatttgtccattctttttctggtaaaaagatccaaaatttcttcaaagggactatgtccaatttttatgcgtttaaccatcagttgaaaaaggttagaattttctgttggtcgctcaattgggcctgaaaagtggtgcaatgattcaggaaaattaaaaggaagatcatccgaggtgaggcaagtaaacaactatttagatttacttaaatcaagagtgcacaaaattcagcaagactttacatttgataaagaaatgttgaccgttcagattttaaaagacaagctttttggtttagatcaaaataagcgcatgttacttactattatgaaagaacataatgataaaatggaaaagcttataggaaatgaatatgctaagggaactgttattagatataaaagttgctacaaacatttacagaattttttaaaggtaaatttcaattgtgatgatattgaaatttcaaagattaatttaaaatttattaatgactttgaatattatcttagaacaaaggatgagaagccctgcagtaataactcagctgttaagaatattaagaaccttggtaaaataattcgaatttgtctagcaaatgaatggttagaaaaagatccgtacattggctacaaatcaagttataatgaagtgcataggaagttcttggatgaagcagaattaaaacgacttgaaacgaagatttttaaaattgatcgaatatctgttgtgagagacatttttgtattcagttgctatactggattatcatttgtggatattagaaatcttacaaaagatcatattggagtaggtgttgatggtaaaagatggatttttacgtctaggcagaaaaccaagattttatcaaatattccactgctttcaaaagctgaagatattttaaatatgtacgtcttcaaactaacttggacattttggaataaatccttaaggagtatttagggttataaatttattaatttctgttgaaaatacaactgtcttctttttcggattgaatccgattttatttgtcttcttttttccaaaatttgctctgatcttccgaagtacacatctgctggaggaaggtttttcaaagattcgtgatatcgcttgttgttgtagttttctacgaatttttctaaagcttccacaagttcttcaggatgatagaagtgattgagttttaccacgtttttcatcgttctgtggtatcgttctattttgccctgggtttaattcattgtttttattttttaattaatgtttcattgaatgctaaagcatttgcggatgcatcggtcttccgtgaacctgcttcatctttaaatcttctttcaggtaggttctgagctcgtttgatatgtagcaggaaccattgtctgagagtaatttcggtttggttttagactttaattttgctttttcaatcgctgtatttacggttcttttcacatcttcagccttcatcgaatcgcatagctcccagtggatgatatacctgctgtagtcgtctaaaacagtgctcagatagtaccaaccccagccaatcactttaaaataagtgaaatctgtctgccacatttgatgcacaaattcggtcttatccttaaattcatttgctgctgaaagtaaaaaatgattcggtgcagggattaaatcccgttgcttcaaaatcctgtaaacactggattctgagatgaaaataccttgttcatcggtaactttgtgcgccagttctcttgaggaaagttctgtatgttccaaagcgatttctactaccaaatctttttgttcttccggaatgctgttccactgtcttttagatgttcttttagatgtttccaagccatcgtagccgttttcaaggtatttctgataccacttatagaaagtacttcttgcaatcccaaagctttccaaggttcgttttacaccaatttcactcgtagtaacttcttgaataatttcgtatttctcacttgctgataatctcataaactttctgtatttatgggttaatccagcatgtctaagcttttttttacaatgtcatagcgcagaaccaaatcggcaaccatctctttcaggcgggcattctctttcttcaaatccgacacttcatcactcgtggcttctctaataacatcgccattgagccgttttttaccggcttccataaattctttgttccatgaataaaactgagattgcgcaatactatgctgtcggcatagttctgctacagaagtttctgcacgaagcccttccattacaatcaaaattttctgctcggctgtgaagatcctccttgtatttttacggatgtctttaacgaatttttcggaacttttctttttaggtgtttctgtaattaaatgtaattctttttttgaaaacactccttaacttttatactatataatgtctactttttgctgacgatttacagtattggagttctgacaacacataattcatatagaaaaatccgtcctgcaaaaaaaaatattggcggatttttttatatgaacattacttctattatttctttcttaagtattttgcttttcattatatataaactaaaatataagtagaaacaataacgtatattacctcgccgcaataagaaattcatttaattttaattttagattagaaaaaaatattcacaatattataaacttttacctctccgcttcacatccctttttaattttttcaatcgcacttttcatattcagattaaagtgttccttttccaatcgaacggccggcgtctgtcttacctcacaatctgcaatactgcacgattcacaagttacaccaacgtttatcgtttttaaagttgatgatttaatgaaattgattttcttaatagtttgagcattcagcagaattcctaaacaataacttcgattacttccatccgaaaacgggtttttttgtgaagtagaaatcaccaaatagctgaatccctgatctttgtaatgagaaatctgggcgtccgtcaaagtttcattttcagttaaatcgtgtagattttttacagcaatccatcttctgcagtagtgttcgttggttgcatttgcgtgtggagcttgttgatggtttaaatgtaactcttttaaaatctgaattttatctgaatttttctttttaacaaggcataaataaaacaaatctttaattcccaattctgaagaaagtacattcgttaatcggtaataaaaagtttccggtgaattggtgaatttctcaatcagactttcaaaattctgggggttccattcattctgaaagaaaaattctgaagtttttgtaatgattttttgttttgaaatcaataatgctccggcaaaataagaagcataaaaattatttaaaatttcctcaaaacttccaaaatccagccaggagtatgtatttggacgattttttaattccaaaacattgaagccgatttcttttgatagaataaatgttttttgatcccgttccaattttttatttaaaagcaatagttttttttcaggaataaaaagcgaacggagattgtctaaagttccatattcttcaaaattttctgactgaattttataattaaatttttcagataagatattttctaaaatatccgactgtagatttttaccaatctctactttattttcttgcgcaaactgtaatgctttatcttcaatttcagggaaataattgtcatacaattcctgaaacgaacgaagaacagcgaagtaaaatcgttcttttcctaaattataattctgagaaatttcaatcaaagcattaatgaacgcagttactttttttggtgcatcgctgataatacttatcaaattatttttattgattccgaaaagttccaaagggatttctttgaaaaaatccgattgtaaaatttcattaaatggagctaaacttttatccagttttgtcgatactaaatcatcaaaagtgcagttcagtgattctgaaagctgaataattttatcgtgcttcggatattttttgccattttcaatttcattgaggtaagatttagacaatccggtctttgtagcgagatcctgcaaagaccagtttttcttttgtctttgctgtttcagttttagccccaaaaccgtcttgatatagtcactttcagaattcataagtcaaagataaatatttggaagcgatttttcgcataataaattttaaaataaatttagcgaacgttcgctgtatgtgaaaatttttatttaggtttgtaatgtcgaatcagaaaatcaattgattatggaaacaaagactcaattaagaattaaagctcagcaaaagtttgaagaaatttttactaatgatttagttgattttttggttgagcttcatcagaactttaatgctaaaagattagagcttttagatgaaagagaaattacacagaaagatttcgataaaggaattcttccaaaatttcttgcagaaaccgaagaaatcagaacaggaaattgggtttgcaatccacttcctgaagatttgctggatcgaagagtggaaattactgggccagttgatcgaaaaatgattattaatgctttgaattgtggtgcttcaacttttatggcggattttgaagacagcaattctccaacctggaaaaactgtatggaaggtcaaatcaatctttcggatgcaatcaatagaagaattgattttacaaatgagcagggaaaatcataccaattaaatgaagaaatggcagttctgctagttcgtccaagaggtttgcatttgaatgaaaaacatattgaaatcaatgatgaacaaacttccgcttcattaatagattttggaatttattttttcagaaacataaaacaattgatagaaaacggaagtgcaacttatttttatctccccaaattagaacattacaaagaagcacgctggtggaatgacgtctttgtttttgctcaaaactatctcggaattcctcagggaacaattaaagcaacagttttaattgaaactattactgcatcttttcaaatcgatgaaattttattcgaattaaaagaacatagttccggtttgaattgtggtcgatgggattatattttttcattcattaaaaaattcagaaatcttccagaatttattctccctgatcgtgatcaggtaacaatgacttcaccttttatgaatgcatactcaaaaagagtgattgaagtttgtcataaaagaaatgttcacgcgattggtggaatggcggcgcagattcctattaaaaatgattatgaagccaacagtcaggcttttggaaaggtcagaaatgataaagagcgtgaagtgaaaaatggtcacgatggaacttgggttgctcatcccgatttggtttctgtggcgaaagatattttcgaccagtttatgcctgagaaaaatcaaatcgataaaaagtttgattatcaaattacagaaaatgatttactggaaattccaaaaggagaaattaccgaacagggtgtccgaaaaaatatcaacgtcggaattctgtatatcgaatcttggttaatgggagtaggtgcagctgcgatttataatctgatggaagatgcggcaactgctgaaatttcaaggactcaagtttggcaatggctgaaaaatgaagcatttctaaatgatgaaagaaaactgaccagggaaatgattcttcaatgggaatttgaagaactggaaagaattgaaaaatatgtcggtgaagaacgtttcaaaaacggcaaatttactctggcaaaagaactttttaacgaattgattttctgtgaaaactttgttgaatttttaacattgaaagcgtatccgtttatttaaaatagaattagaaatttttaataagaaaagttctcgcacaaaatttttccacatttcaattcgaatagtttcacttgaaatctcagatctcgcaacttgaagaaaattttaaaatccaaatattatgaaaacaaaacaggaaaaaattcaggaattagaaaaagactggctggataatccacgttggaatggcgtgaaaagaccttacacagccgaagatgtactgaaacttcgaggttcttaccaattagattatacgattgctaccgaaatgtcaaagaaattctggacaaaactcaattctcaggattttgttgccggattaggagctttaactggaaatcaagcggttcaggaagttgatgcgggactggaagcaatttatctttcaggttggcaagttgcagcagatgctaatttgtctggtgaaatgtatcccgatcaatctttgtacccagcgaattcagtaccttctgttgtgaagaaaattaataatgcattattaagggcagatcaaattcaatccgtaaacggaggtggagaaaaagaatatttagttccaataatcgccgatgcagaagcaggttttggcggaaatttaaatgcttatgaattaatgaagcaaatgattgaggcgggagcggcagcagtacattttgaagatcagttatcttctgcgaaaaaatgtgggcatttgggtggaaaagttttggttccgactcaagaagcggttaataagctaatatcggctcgtttagcagcagatgttttgggagtaccgactgtaattattgctagaacagatgcagatgcggcagatttgttgacttcagatattgatgacagggataaaaagtttgtgacagggaaaagaacttccgaaggtttctatgttgtgaaaaatggtgtagagcagggaattgacagaggtttatcttatgctccttatgccgatttgatctggatggaaacgtcaaatccggatctggagatggcaagaaaatttgcagaaggaattcgtacaaaatttccagataaaatgttggcttataactgttcaccttcttttaattgggctgcaaaattaagtgtcgatgaaatgctgaatttccgagaagaattgggaaaaatgggttacaaattccagtttattacattggctggttttcatgctttgaatactgcgatgtttgaattagctttggcatataaagaaaaaggaatggcaggttattctgaattgcaggaacgcgaatttgctttgcagaagcagggtttcagagcggtaaaacatcagtcttttgttgggacaggatattttgatgaaattcaaaatattgtaaccaatggttcggcagcaacagtggcgatgagagattctacagaaacagcacagtttcattaaaaatttaatattggcaaatttcattgtatttttgcgtttaactattcttacaaaaaatccattataattaaatttaattgttgcaatcttcctcttttgaggaaggtttttgttttgaatgttctattgagtaaatattgagaaatctcaattataaagattgattttttatagttaaataggttttattctctcaaaattacaacaagattaaagataagatatttccttttatcaatttaagcttttaaagcaaataggtgggattagggattttcagtacataaaatacgaatttcggtacattacgatagattgctatggctttacatttgtaataaactctttaagattattgtttcatcttgaaaaataatgtgaattagtattaatcaaaaatcttaattatgagtttcatagacaaagtaaaattggctgccgagttagcaaaggcgaatttcagtgaaggtatcgatgatggttatgaccattccactacatctgccggaagaaaagggttaagatccggccgtgtatctgagttaactgcgatggcagacctaaaacccggaggtgcagaaaatctcagaaccataatggaaattgcaggtggggatctgaaaggcgcaaccaaagtaggaaccctgcatgaccttcgtatagttttgtttgataacgataccaagattcttttctgcacggcttacgatggcgactgggatgcttatattgatgatttcgccacaaaaattccacagttgatggacatcatttttgggaatgtagaaggctggccaggcataaaaaacccgagtgtaaaacagttcattctagaccatcagattaccgcgacaggttggtatgtaggtgttccgcatcttacggtgaatgatataaggagaaatgataaaatcattaaaggactgaataaggcaattgacgaagcaaataaaatctaacctatggcattggaatttttaaagcggatttttaatcccaataaagtagaaattgagctgaacgaaatacaggccttaattctcagaagccgccctattccgtatttcggaacggtggcaatcattgaaatcaaagatgctgtggcagccagacaaatgctccaaaaactgttgccgattgtgagttctgcggaagactggcataagaatgaaggggcatcggttactttgacattcacttataaaggtctggaaaaaatcggtgtgcctcaagagtcactcgatacttttcccgaatccttcaaggagggaatggcagaacgttcccggtttctgtacgacattggagtcaatgatcctaaaaactgggaaaaggtttttaaaagatcacatattcacatcgctgcagcaattatcgccaacaatgaagaggcgtggaaaagccagctggaggaatttcgttctaaattgacgaataacagcggcgtagaagtaataatgagccacgatttctccgtatctgaagaggttaaaaatgtattcggattcagggatggcatcagcaatccggaaattgaaggcagtgggatagatgttcctcccgggtttgatcgtccacttaaagcaggcgaatttataatgggctatcctggagaagcaggcatcataaagccatttccacaacctgaagttttaggtaagaacggttcttttatggttttcagaaagtaccaaagtcaggtagcagaatttaatcaattcattaaggaaaattcttcttcgccggaagagggagaactcttggctgccaaaatggtaggtcgctggcgaagtggtgcacctttggttttagctcccgaaaaggatgataaagcgctaggagatgatatgcaaaagaacaatgatttttctttcaagaatgatgagtacggtaaaaagtgtccgttcagttcgcatatccgcaggatgaacccaagagattccaaatcttttgttttggaggatgaacgtttgcacaggatcatcagaaaaagtgtaacttttggcgacattgttccgccggaggtaaccaaaaatgacggtaaggaacgtggacagtactttattggcattagtgccgatgcaatgggaacactggaatttcttcaaaaacaatgggcaaacgatggtaattcccaaaatctgggaacagaaaaagatcctatgatcggtgtacaggacgaagacgcactgttttctgcaccgggagaacccctcatcaaaagataccgtggtttgcaaacctacaacattgtgaaaggaggcgaatattgttttattccaagcatttctgctttaaaatggattagcgaattaaaataaaaaaagcactatggaagattacatcaagtacagttacgaagtggaagaaattccagaaaatttcgatgagtatattaccaccattaataacgatatccgcgaatacatcaaaaatacgccaaacctaagcagggcgacccatcataccagagatgcgcacgccaatggctatgcagtgctgaaagcagaggttgaaattttggataatctgcccgaagaactggcgcagggcatttattcgaaacccggaaaacaccaggcagcagttcgcttttccaatggttcgtccagagttttgcccgataaactaagcggtaatgcacaaggatttgctttaaagatttttgggatagatggcaaaaaattatctccgggagaggaagattctcccaatgttgattttaacctgattaataatccggtgtttttctgcaactcggcagaacattatgttttcatttcaaagctgtttttaaagctaaatgatttctttgaaaagggagcgttgggaaaattggaatttgccacactttgggtcaccgaaaataaaaaagcatttccaaattttgaggctttgaaggaattgggcgctcttaaaacttttgaaaaaatcccttccatcaacagttttctttatgaattttacagtatgggagcagttcgccacggtgattatatcgccaaagtaagagtgagcccaactgagcagaccaagaacgccatcactgaaaaaaatattgatctagacagcgcagaatggccgtacagaaaaggaattatcaaagaaatagctcaaaaagaccttacgtttgagttgcaaatacaactttgcaaagacctgaaagaaatgcctgtgaatgaccttacaaaagaatggtcgcaggaattatcaccattccgtacggtggcaaaaatcacaataccaaaacaaacggttcctgaggatggtaattttgaaattatggaaaatctgtcgtttacaccgtttagaaccatagaagagaattcaccgatcgggaatttacagcgttcacggcaatcagcgtatgtaacatcttcaacctcaagacacgagctaaaccataaaaaacgtaaagaaccaaagaatttggaggaagcattcagtccggagttttatcaattataattgaaaatgaagattctgagtcctagttccgtaaagtttattaccaaaaatcaaccaaaattatgagcaaaataaaaaatgtaacggtagctggaagtggtgttttaggattccaaattgcttttcaaacagcaattcacggatttgaaaccactgtttacgatatcagtgatgaggtgctggaaaaggcgaaagcaaagttcgacggcttggccgaaagtcataaaaaggatcttgacgccaccgaagaacaaattgcaaaagccagggaaagactgcactattcatccgatttggcatttgctgtgaaagatgccgatcttttgatagaagcagtgccagaagatattaaaataaaaacggaattttataagcaactctcttcaattgcaccggagaaaaccatttttgtaagtaattcatccaccttgttgccaagtcagtttgcagaggtgactggaaggcaggctcaataccttaacctgcattttgccaatcaaatatggttgcgaaatacggcggaaattatgccccatcccggaaccgacgaaaaaataactgaggaaatagtcgatttttccaaggcgatagggatggtgcctgttttggtaaaaaaagaagttcctggttatgtgctcaattctttattaaatccatttctgaatgccggaatgcagctttggattggcgattacgctacgccagaaaccatagacaaaacctggatgctgggaacaggttcgccttacggaccaatggctttgtatgatattatcggattgacgacaccatacaacatttacaaactgcaagtagaaaaggggaaaacagatgataaggctgtgttggataaacttaaatcaaccttcatcgaccaaaataaactgggaatttctactggcgaaggtttttacaaatatccaaatccttcgtggcaaagcccagattttttgaaagtgccggaagccgatttatctaaggtcagaatcaaaaatgttgtggtggctggaagtggtgttctcggttttcagattgcggtgcagtgcgcttattttggctataaagtcacggtttatgatgttaatgatgaagctttaaataaggcaaaaaaccgttttgatgtcttggctgaagaatataaaaactacctgaaagctgatgaagaaaaaatcgaaaataccaaaaataatctcacttattcgacagatctgatgtcttctttacaagatgctgatttattgatagaagccgttccggaaagcatcgatatcaaaaaagatttctgggaaaaagcttctacgcaagcgcctgaaaaaaccatttttgcgagcaactcgtccacacttttgccgagcagattaagcacatttactgatcgtccagaaaaattcatccatttacattttgccaatcatataatggttcgtaatacggcagaaataatgggttcagatcaaaccgacccaacggtttataacgaaattgtagagtttgcaaaatccattgctatgcttcccgtggaactgaagaaggaaaaatcgggctacgttctggattctttgttgattccgcttttggtggctggccttgcgctgtgggcgaatgacgttgccgatcctgcaaccattgataaaacctggagaatagcaacaggtgccccttttggaccaatggctattttagatttgaatgggatgaacaccaattacaacatcttaaaagaaatcccgggagaactaacacagaaaatagcagaaaagctaaaagccgaacttatcgacaaaggaaaacttggtcagcaatccggcgaaggtttttacaaatatcctaatccggaatggcaaagcaaggattttttgaaagcttaaagtatcctgaattctcatcgaaaacagtgaaagaagccataaatataaataccataaaaaactcaggatttttaaaatcctgagtttttcaagtataaaacaacctcttataacaacttagcttcttttaaaatctcttcaacataagtaccttctattttcttgataccatatttctcaaggattgaaatcaaccaaggaaattcaatttcattgaggtttttattgtcattaaggtgatagatggatttcagcagtaccctgatgtcatatgaagaagcaaaaacttctgggacacctctgtctacatccaaaagggtgtaaactgcctccattgctgtacgcacggaatattcggttgtgaatacggtgtcttttccagtttcggcaaaattaccgataaaagccaggtttacagaatccttcggaaccaccaatgggcggtctcccaatgcacgaggcataaagtaagatgtgatataaggcatacggcaagggatgctgttggcagcttgtgcaatttctgctatttcattttcaggaacaccaatatggtataaaaattctttgcaaagctctatgcccgtagcttctgtaattttcttttggatataatttcctggtttatgagaatacaacccatagacccaaacaattacttcattttttttctgagccttgaagtggggctgtctgctgatggaaaagccataccaccaattggagtcgtttattgtgacaggtccgctagtcactattgaaccgcttcttgggtctttttttgttattttttctatatacggaatcactttttcgtcgaagaaggtaatgcttccggagattacccagttggcttcgggaatgtttttgtagaacttttcgggttttccaaaggcatcgtcctggtctgccagattctgccaaagttgccaacttccgccaatgccgtctgcaacaggagcagggttatgattgtcaccgtatgtactgctttcggtaatggagccgttggtaacaaacaccaggtcgtttttggtcaggctgatgctttctgcattgccatctttaatatattcgattttcttcgctacttttttgccgttttcattttctacaagtatgttctgaacctggctatcatactggaagataacaccgtgggactcaaggtagcttaccaacggacgaatcagtgattcatattggttgtatttcgtgaagcgtaatgaggacatatctgctacgctgccaacgtgatggatgaaacgaagaacatatcggcgcatttccatcgcacttgcccaaggttcgaatgcgaacatcgtagcccagtatgtccaaaagttggattggaaaaattcttctgtaaatacctggtctatctgtacatcctgtagtttttcttcaggaagaagaaccagcgctataagttcgtggatggctttctgggacagggtaagcttaccatccgtgggcagtctttctccacggttttcgataacacgggcgtgggaaaagctagggtcttctttattgagccaataatattcgtccagtacggaaacgccttccgtttctaatgagggtatcgagcggaacaaatcccaaagggtttcgaaatgtgtttccatttcccgtccgcctcgtatgatgtagcctttctgctcattccagatgccgtccatactgccaccgggtaaagctaattcttccagaatacggattttgtttccttccatttgcgcatcgcgtatcaaaaaagctgcagcagccaatgaagctaatcccgaaccaataagaacggcagatttctgttcaatatttgccggttttttcgggcgggcaaatgcttcgtaattcccattactgtaatacataattagaattttttagtttataatatatgataaaataaccttgtttttatttaataaagttacacatattgctttcactttatatatcccaaaattctaattgtatatgctgatattccaataatattatctttggagattctgtttttcggcttcctttttctttttttcctgcttgcggaagtaacctctgaagagaaaattatgcttcagagcctccatattctggttgaagccttcggttcccttttcgatattgtaaaggctgttattgatgttttttgtaagaacggtatcagtgataagggcatttaccggtccttttccattttctatatttttactgaatgtctgcaggtttttaccaactgtgataagttcattgcttactgtattaagattattgctggcggcattgacgttattgaaagtctgcttaagctgggactcaaaatctttgttggcaaggagaagtcccgttgctccttttccttggcgtgtagacgtaatgatggcttctgcagtactgctcaggttttctatattttccgtgctttggcgtattttcaggatggataattttaagttttcggcaaatgccttgtcattaattaattttaaaatctggctgctgtcaattttatgcacagtgtttttaagagatttggatatatcctgtatattgttgttgcttgccgatagcgtgttgagtatttcatccacacctggtttggtatctgccgtgagatattctttttcctgcactggtctgcccggcttaccgtaaggcaaaatattgaccaccgcattgccgataatgccttctgttccaatcgaggctttggcattattgtctatatgctttgcaatatctttgtctataagcataatgacctctatatcatcccttccggacaattttactgactttacagaacctgcctgcatccctgaaaatagcacattgcttccttctctgagtccattggagtttttgaatcttgccctgagctcaaatttgctggtaaaaatgcctgaaccgctgccaatgtaaaagaaaacagccatcataagtataagccccgaaattacaaataagccgagcttgatattatttttattcatattttaatcaaaaaattgtttaatgttttcgtcatcagaactttcaaattcctgataagtaccttgtgcatagcattttccgtcaagcagcaagactactctgtcagccgtatttttcacacagttcatatcgtgtgagataatgattgatgatgttttgtattttctatgtatatccatgataaggctgtctatttcttttgccgttaccgtatcaagtccggtggtaggttcatcataaaggatgatttccggcttgaggatgacagtacgtgccagagctattcttttcagcatccctcccgacaattcggatggcataaggtctacggtatgtttaagccccacactatcgagtgcttcttcaacccgtgcgtcaatttcaacctgcttcagccggaaccaccgtcttcttaaagggaattccagattttcgcggatggtcatagagtcatagatggcatttccctgaaaaagaaaacctatttttgagcgtgccttgtccagctcttgattttccagttggacaatatcctgcccggaaatcattatcctaccgctatcaggtgttaaaagccggacgatacatttgataagcacagattttcccgtgcctgattttccgagaactacaacattttcgttcttatcgaccgttaggttaaaaccgttaagcacttttttttcaccaaagcttttataaatatcttcaatgacgatggccggtccattgtcattattgccgtttgctgttgtttttgtttccgccataatgatgatttaattatatccgagaatgccggttatctgtaccgcaatcaggtccaaaacgaagataaggatagaggagagcacgaccgctgaattggcggcgttccccacaccccgtgttccttttactgcattatagcctttataggcacccacgattcccactgcaaaaccgaaaaaaaagcttttgataaaagctggtatgatgtcactgaaatccaaggagtcaaaaacctgtgaatagaaaagtgacaggctagttgtaccgccaatgttaacacctatccaggcaccatatagtgaaatggcatccgccaggatgataagtacgggaagcataaatgttgtagccaggacacgtgtggcaacaaggtatttaaaaggatgtgtaccgcttacttccattgcgtctatctgttcggtaacccgcatcgagcccagctctgccccgatgctacttgcaattttacctgcaaagatgagagcggcgattacgggtgctatttcacggatgatggcaatgcctaccattacaggcagctgggattccacaccatagcgtacgaggcttggccgcagctgcatcgtaagaaccaagccgatgataaagcctgtcatggcaataagccccaaagatttgtagcctatgagatagcattgtgcgagcagttcctttatttcatatggtggacggaaacataatagaaagtaatttttggtaaactgtgtgatattgcctgtttcctgtaaaaaactacgtattttaatcattaacaaattatttttttaaattaaaatatttttagtctacttttccaattgctgtatttttttattgagccaattccttatatcttcatatacatattctttaatatcctcattaagtatttcgtgccgcatagcaggataaattttagttttaacatctgtaaaaccatctttttgcatttgtgttaccgttttttcgatagcttttccgaagtctcctatcggatcatcagctccgcttacaaaaagaaaaggaaattcctttggtaatttttctgcccattttctttccgttgcctgttggtttagagaaactaatgcgtaaaaaccattattggtaaaaggtactccgcataggctgtcccggcaaaatgattcccggttggatttgctgaggctcagccaactggtaaggtcgccatctttctcgcctttaaaatgttgattattaatttttgaaaaagtttggttgatgaatttgctccggtgttttggagcaataatattgttgatggacaggaaaaatttagccaaaccgattccgttgatttttcctcccgttcccacgatgaccgcgcctttaaaatcagcttcctgattctgaagtaagcatcgtgcaatgaaagatcccatagaatgccccagtaaaaagtgagaaatgttagggtagttgttttctaaaaatgctgccatcgttgcggcatcgtctatcagttgctgcttgggattttctttttgaaaatagccaagttcttcccggttttccgccgtttttccgtgtccgagatggtcatataatagaactgcaaaaccgttgttcgcaagatattccgcaaaatttttataacgaccgctatgctcctgcatcccgtgtagtataaggacagtagcctttggaggttcatttattggttcgaataattcataaaaaagattgtgcgtacctgagttggcaattttcttcctctttatatatcctgatgtgtgttttgccatagtcggttggttttgtacaaaaataaatattctgcccttgacaaaagcaagagcagaataaagttagataaattggttattatagacaatcttttatagattaaagagagattcggtatcctaatgaaagattccagccacggttataagatgttacgttgtctatattggaaagattacctaatcccaggccatattgtcctttcagatagattccccaaggtgtttcatatccggcaccgaaattaaatccccaatcgaatccttttgtttcatcgctgccactaccaaagttgatgtcggtttcctgagaaccgattactgggatattctctcctttatatttgccgcttactccaaatccgatgtaaggccctacctctgcaaaaattcctccggactttcctccttcaattttatactgatatccgagattaacagggacttcaaggtagtctaggctggttttgaaatctccgatgctggtggtggtttttgaacccttgttgctataaaataaaccgggctttacgtaaaaaccttgtgacaaagggatgttaaagcctgccccgatgcggaatcctgttttggagtcatcagattcggaagaattatcgcctacctcagtctttattttattaaaattcagacctatttcagggtcaatcgtaatttgcgcttttacaacgaaagtagttgcacaaagtgcaatggccaatgtgatttttttcattttttgtattgatttaaattgtcaatctaatattgtcgttaacaaaatttttttatttttaatttctgtaagaggtatgaatggcttttgccaacacgtctggttttttccagtgttccgttactggagttacttttttatcgagaccgagtagggtatataccgcgatgcgtgctgcacgaaccgaatattcttctgtgaataccatatcttccgatatttctacaaactgactaatcattgctaagttggtgctgccttcaggaacaactgcaggacggtcttttttagctcttggctgaaacaaagcatcgatgtaaggcatcatacacggaataacattgataatgctatcttttatttcctgttcgtgcttttcaaaatgtaaatgatgaatcaactctgtcaaaatttcttcgcccgtgcaatcaatcatcggctttttcacataatctcccactgcatctggatataatccgtagccccaaagaatggtagtatcatcgccttgcgctttgaaatgcggttgtgcagccaccacaattgacattcgccacgatgaatctttaaatgtcatcaaagctccgctgcccggtttgttgccagtgtattcttcaataagttttagaaatttatttcctttgaatgttggcgtaaatgaataccattttgtttcatcaggtttggtaaagaacgggtcggggttacccaatttgccgggtttcttgttggcaattttacgccataatgcaaaacttggcggatttgacggtaaatattttgcaggcgtattataatcgccgttattagaattatctgtaatacatccgttggtaaagaataccaaatcgccttcattcacggttattttctctctttttccttctgcattgatgcattctatttccgttacggtaatgccatcatcatcggcaaaatccaaatcggtaacggtttttcttaatgaaaagtccactttatgctggtccagaaatgccttcaacggcaagataacggattcatattggttgtatggtgttctggtaaccccttcgagtgtttcgattcttgaaaattccaacagcatacgtttcatatagcgttgaaattcaaaaatactgctccattcctgccaggcaaaagtggtttgccacatataccagaagttggtcgtaaaaaaatgatcgtcaaaccaatcacgaatggtaatgttgtctaaatcattttcatcggcaaaaaacaatttcacaaatttcatccggtcctgagtgttgaaacccatatccgttacgggtaaaatgtttccgttcttgtcaatcaaccgagcttttgcctttgtcggattcgcgtggtcaaatgccataatttcatcttttacggaaatgttcgggacatccagagaagggatacgggatgttaattcccaaaagttttcataggtttcttcgttgagcatacgcccgccacgacaaataaatcctttttctttagttcccgcaccatcgttgctaccgcccaaaatcggcagggcttcaatgatgtgaatgttttcgcctttaaagtctccatcttctaacagatatacggcaccggcaagacttgccaatccacctccgatgaaatacgcatgtttgttcgaattgctcatatgatattttttttaggttatttttatatgataaaggtattgatataccttaattccttagtatccctaaattcgaaaatcatatacggaatttcttttttaaaaatgctgttgtcttcggtacttttggggcgatattgacgcatgctttttaaagaaacggccgaatgcagaggtagaattaaagcccgtttcaaatgcaatctgagaaatgtttttttctggatagccgagcagaacgtatacttcttttaataaggcctcatcaataatctgatgtggcgttttgccggtcgctttttttacaatcagaataagatatttgttggtaatgaatagcttgtccgcatagtattgtacgtccttatgctgcaaaatattttctttcaccaattcattgaatttaaaaaaaatattattgttatcctgtggagttggatatgcgttgtcttttctgtcttcatcagttaggactgcaacttccaataaaatattaataataatagtacgaacaatatcttctgtaaaacgaccatttctcgtggactgctgttgaagataatccaataaattgattaagtgtgtactacttgattcgttggaaattactacgttaaagctatttttattgaatagagacagattctcgataaaaaatggattagaaatgttcttgagcaggaaattcttttcaaagaatagaaccttcatacggaaatctttactggtatttacaaattttataattgttgacggagcagatatcaggaatccgttttgggatatcttgtaatgctgattatcaatttctaaatctatactaccagaaacacagatgcagaatgcataaaaatccattcggaagagtctttttgggaattcaaaaatgagttttcctgacgatataaagtaaggttcatcacagtgtacctgataaaaagataatatttctttaatactttcgtaagctttcatagcttcttatttaatggatttatgcaggaagatatatttttcgccttatatttatctcgctacagctcctctcttttaatttttcggactttgtaccataaaacgctatagctggcaatagcgcttactgttcctataattatcatttttataacatagggataggtgaggtctacagcgcctttttctatgataagtattctaaaggcaggcaggaaatgtgtaagcgggatgatatttgcaatgtactgaacccaagtcggcatttggctgagcggccaggtaaatcctgacaggataaagctgggtgtggcaataaccataaggatttccgtagctttcagctggttcggaacaaggatacttaccaaaattcctataaagcagaccgagattacaaaaacacctgctattagggtaagcggaaaaatgttttcataaaaaggaattctgaaccacttggtaaaaccccagtacatcagccatatcccgaagctcattatgagataaggcacgattttaaccagtatcagcataaatgcagaacggcttctatgtaccagatatttgaaagtgccgttttcaaactcggaagcaaaagaaagagccagtcccaatagtaatacctgctgaagcacagtagccaaaacacctggccacaaaaaatacatatagttggtgcttctgttgttcttttttataaacgtggttttaaatggctcgtactgactcatcagcaaattttccggaactccttgtttgcgcaatgtttcgacctgtgttcctgctttcagggttcctaagaccagctgaagtgctgatgaagaataatttgccgtcaatacatttgcagtattgactatggtagtgacttcaggatatcgttttgtcagcacatctttctcaaaatcttttgggataataacgacgcaggttgcatctttctcaatcatcaaacgattgaggtttgtctcgtcaaactgcagccttgcaacagacaaaacttcgttgtcattcatcatttcgattgctttccggctgagtgcgctttggtcataatctaccactatgattggtaaatctgtcactttccctttgctgtacacatatcccaacaaaacaccgtacatcaaaggagctccaataaacaaaattcggaggaccttgttgctccagaataagccgaactcccgtttgatcagattgagaaatgttttcattattaaggttttagcgttactgttgttttgcttaggatatcgtttgcttgttggatgttaatagggtctatcaatatttcgtacaaagcatcctgcacttcataatcaggatatgctgtagcaatattagcataggcacctatttgttttatatttctgattttccctttgatatcccgatttttgtaaggtatatgcacattgatttcttttccttgtgcataatttgccaattggctttcaggaatagtaaaacggaaataaatggaattattaagagaacctttgaaaagcgtatatcctggtagtgccagttcccccagcttcaatgtgatggattctattttcatatcctgtggtgcaatgatatacctttctttctcggcaacctgtacttcttccaaagctccttgtgcacggtctttttgtcccaacgccattgtttgctgttctatgcggaccccgtttttaacatcggcaatttctgcatctacggctatcatttgtgatttggctccctgatacttcgcgaatacttcatcatattgctgttgcggaaccagtgaatcctttaccattgcattcattcttgccagcgatttttttgcaaactcatattgctctaccaaagcggatttcttggcatagagctgtgccaactgattggcagtagcaccgtgtacactcatatcatattgtgcctgagcagattttaccgcaccttgtgcctgtgatttttttgcgtctacttctgggatttccaatatcgccaatgtatctccctttttaacaagagctccctcgctgatcagaattttatctatcctgcctgctattttgcctactactgcaatctcttcccgctcggtttttccctggatggtttgtgatactttcggtttattctcacaagaagctaaaatgcctgcaatgcttagtatgtaaataatttttttcattttgcttagttttggattttaataaagtttgataattttcccgatgcacggtaaacttcaatagcagcattacgctgttcaatcacggtttctactttgtttaaggattctttgtatatatcgttttccgcccccaggcgttcagtgacgttaataagccctaatctgtattgttttgatgctatctcattattattttgtgctattttttccctttggatcgcaatatctaccttatgtaacgtggtattgtattctaccttgtttttttccaattccaggtctactttttctttggtgtctgccagtttattttcaacctgggcgagtcctattttggcttcgtctattttatgtttacgttcaaatccgctgaagagttcccatttcacggccacgcctaacatccagttcggatgtagtgtcaattcatttagtttcaaattggcggtcgtatttaattgttcaatcggcacttttgtattggcattatataatgatgcatagctatatcccgcaaaagccccaactgtgggaagaaggcttcctttttcttttttaagggcatattcggaagcttttttgaaatattccagtgcttttacctcatttcgttcggctgtgctcaggctgtccaaaataatgatgggctccaactgatgattggttttaagaatttcttcttcagaaagattggtggattgttttatcttgagtatcagaagttttcttttattttgaacatctgcacgtttggaagccaattccagagtggagagtttgattttatcgcggtcataaggaattgccaacccttcggatatcgccttttctactctttctttttccttattcaatctcttttcgctgttatcgatcagtgtttcggcggtttccagaagtttgagacggtcaaagctccctatgatatcttttatcacctcatctttctgattttccatcataaaagctgttcctgtatttttttctttgagagctttggctccattgaggatttgtccgccactgaacagtacagcttttgcggtaagacctccataaaggatattcgcatttgtgctgaaatcggaagatcccccaaaaacaggatatcctgtgatgggtaaattcagggtagctagatctaattttgcatcactgctgatgtaagagtataaacctgaagcctcgaccttcgggatatatttggccaatatgcttttgcgttctaattctaatttttgtaattcaagatcttgattccttatttcagtatttttttgcaatgcctttccgatagcataatccaaatccttacttataagaatctgtgcgttggtgatagtgccgagtaggatcaatgtaatggctaactttatttttttcataccatttcgttttgaatgttgttttgaatatgctgaaagaagttttttatctccataatttgattttctgaaagtcctctggttgctctttcggtgacattgttcacaatatacattactttttcctctatctcctttcctttatttgttaaatatattagattttgccttctgtcagtagggtgagaccttctttctacgtaaccttctttttccaattgatcaataagtctagttatgctgggtttatccctgtgggtaaaatctgctattgcctgctgtgaacatccctgttgtttccataaaggtactagcaccgaccattgttcccgggtcaggttaatattattcaatttgaattgctgacccaaaaaacgattgaacagtagaggtacattcccggtaagcagattgtatcgatcttgttcagttaatattttttcagctttcatataaaaattattattgaacaaagttaattaaacaatagttgtaataacaactatttatgttaaattttttttaatcttaaaatcattgagatgacataagcttttttatttaattcttgttagtaccatttgtgattagtgaaaaatgtctaagttagtttgaagacgtacaataatgaaaaatcagctatatttgcatcagtaaaaatagtagttcatattcttgcttcaaaaagtgacctattcagtgacctgaaaaacaagaatacagtataaagcgtatccatagggagttttttaagaaagaacaagtcccgtccggatcgcagctataaaaacaaaatagcacaaaaagctttaaaacatacgttttaaagcttttttcgtttttagactatttaaaaagagtcaaaattgcacaatctgaaagtgacttattcagtgacctgaaacatacggaaaaataggtcactgagaaattgaaaattcaattcgatattttttcattaaaaaataaaaaaaattgaatattctttgaaattttttatcagattttttaatcttaagtgacctataaaagtgacctcactcaagtggtttaaagaggtcactaaatgttttgaaaagcgcctctggtaagccagttcagaaagtgaatatcttgttaatgttttttactgaagttaattttaaactcataaaattcaaataaatgaacaagacatttaatctacttttctatgtgaagaaatcaaagatcaatgctaatggagaagtgccaatatacctgcgtattacggttgatgggaaaataaccgagattagtaccaaacgtactgtgaatactaaaaaatggagttcagggatgcaaaaagtaactggtacatctgaggaagtcaagtcgcttaatttttatctcaaaacatttgaacataaaatttacaatatctatcacgatctgattaaagataacgaaaaagtaacttgtgaaattctcaaaaataagttccttggaacaggtgaattcaatagaacactaataccaattttcttagaccataatgatagaatggaaagacttattggaaaggagtttgcatcaggaactctcggaagatatagaacttgtctcagtcatatcagagaatttttgaaatggaaatataatgtatcagatattaatatcaagaaaattgatttcgcatttttaaatgattttgaattctttttacgaactgaaaagtcttgcaataacaattctgccgtaaagtatattaagaactttggaaagattgttcgtatctgccttgccaatggttggattgaaagagatccatttcttaactatagctcaagttttaatgaagtaagtagagtttttttaaatgaacaggaattagaggttatgttcaataaagatttcaagaatgagcggttgtcacaagtcaggtttatctttctttttagctgttatacaggactggcttacatagatacgcaacaacttaagcaagataatattaatattggcttagacggtaataaatggatttacacaatacggcaaaaaacaaaaacaaaatcaaatataccattactccctaaagcggaagaaattatcgagaaatacgcaaatcatccagcttgcttaaatagtggcaagctgctacctatactaagtaatcagaagatgaatgcttatcttaaagaaatcgctgacctttgtgatataaacaaagaactaacttatcatattgcgcgtcatacttttgctactacgataactttggcgaatggtgtccctatagaaagtgttagtaaaatgctcggacataaaaatattaagaccactcagcattacgcgaagattcttgaccagaaagtgagtgaagatatgctagtgctaagaaatattcttcaaataaaagcagattccctaaattagaatttacaatttagattttaagcgagggtaagattttataattttaaaaaaataattaagaaaatggcaccaactctctttagtgggtgccatttgtcgcttgtaactataaagaaatagatatagaaacaataaaaaaaaagatttagaaaaatagtaaaatacataaagtgattaagattgtctttggtttatctaatagaacttggatgtgatagatttcaaatactactatatacttatagattcttaaatgcttttaacatatttagtggatttgattaagatcaagtacataaagaaaatgttccagattgaccaccttctttatagcaagccctggtgttgcccaagccatatccatattaactataataagttcatttcctcgtaaaactacctcagcaggttgatctagctgtccatttacaccatttacatcttcattatgatagagtagtttcactttaccatttttagagatgcgataaattgaattaccattaaaatccgctaaataaaaacattttcgcactgtgtcaaataagcagttcgaaaatcacattgccgaacattggaatttttttgacagacaatgggtttaaaaacggttgaatagactgtggtttcaattctaatttgccagcaggctttgcttccccggtttctatttttgaaactgttttattggttgataaagcaaaactaatcggtaaacctgtatttttctttacagccccagcaatttttgttgtccactgatagcatccgaaaaacttatccattcctgagagatcaagatagaactcatcaacactggctttttccataatgggaactttttcctggataatctctgtcacctgatgtgacatattgaagtagtactccatatagcagcttgggaatatttggcatatcgattagcaatcaatgcgggaattaatatgtctgaaactaaaattcaaaaattaggtaataattaccatagatttttcactaaacgatttgatcgcattggcgaaggtagaattcatttttcgtcagctatgactatgacaggaaattatgaagatttattaaaagatgctacacccagctatttagaaattgttgattttatagaaatatcaggtgcagatatcaaaaataatttggaggaattgtggagaagaatagtattcagtatctgtatatcaaataccgatgatcatctccgaaatcacggatttcttttaactccaaaaggatgggtactttcaccagcatatgaccttaatccatctgttgataaagattactggtgcaacgagcaagcctaacagactaaaaattcaagatgattttaattccggtaaagtcaaaattattctcggcagcgaagctattcaggaaggaatgaatcttcagcaaaatactagtgacttatatatgctctctcttccctacaattttacaactttacgacaggtcgaaggtcgtgcctggaggcaagggaacaaacacgaaaatgtaagggttaattttatgcttactaatgatagcatcgatgtatttatgcttcagaagcttcaatcaaaacaagcaagatatttggaagcaatgaaaaaaggagctaatgttttagatatttctgatatcagtacgcaggaactcaaaacatccattataacaaatccggaaacaagatctaatattgaaattgaattgctaaaaagaaagattgaaagtgagaaaaataagcatctggctgataattcgtttgttttaaggaagtatgaagatttcttaaaagtaaaagagttggtaactaaagctgaacattcctataataggattttaggatactctgaaaacagcgatataaattcggattactggaaagaccaattaccatcatatcagaaagcaattgatttggctaaatctgaagttcagaaaacaattgaatatctagctgaaaagggtgttaatgttacagagatcgaatttcaaactaaaactacggataataaaatagctgaattggacaaaaagttggaagagctcccacacattaggatacagatgattacaaaatataaaattgagaaggagaaaaaacaaaaactgagtcaaacgagagataatgtaatggaaaggatggatgaaaatgttaagttcttcgtacagaaaaatagacaatttagtgaaggtggttcaactaacatcaaagctgttgctaagcaaacgtcagaccgtcaaatcggagaacaacctataaatcttttgcgaaagagatagaagaaacaccaaatgaaaatcacatcaattttttcagagaattcttttttataccagacaaatcttaaatatccctcactcacttgtagagagctttattgtacaaaatatttacgatttttattcaagcttcaaaattgaggatgaaataaatatgtccttagaacttaaattttttaaatgtccaaagcaaaaataaataaacggccgtctgctaatgcttcaaatttatttgaagtagagtcgattatgaattttaaagaaatgcctttggaggttgctattaaaatgctcaaagcttcagaaatttttgtttcggaagaagaagcttccgagatattatcacttttacatactcttgctaaaattacgatcaaagagtttcttttaaataacgattaatttcttattttagtgattcataattacttagtttaacaactttgtaagttttatattattctttatttccaatttaaattaaatgaatatgaaaattgctgatttatatatacgtgtatcaacagacgaacaagctgataaaggatattctcagcgtgatcaagaggaaagattgagaaaacattgtaattctttgaatatagttatcggtaatgtaatttatgaagatcactcagctaaaacatttgaaagacctgaatggaaaaagtatatgtatggatttagaaggttaagaaaaattaaagaaggaagactgttattattcacaaagtgggatcgtttcagtcgtaatactagtgaagcctatcagatgatttccaatttaaacaagctaaatattactccacaagctattgaacaaccgcttgatctgagagtgccggaaaataaacttttgcttgcgatttatttgtctactcccgaagttgaaaatgatcgtagggcaatgaatgtgacttatggaatgagaagagctatcaaagaagggcggatgatgggaatagctccgtatggatatattaatagaagtaaagaggacgggagaaaatatgttgcagtcaaagaacctgaagcatcaaatataatctgggcttttaaacaggtagccaaaggacatcttcctactgctgtggttcttaaagaaatgaataaacgtgaaggaaggaaacttacaaaaaattcatttatggaagctttaagaaatatagtatatactggcaaacttttgttaaaagcttataatgatgaagaagagagaataattgagggaaagcacgatgctttaatctcagaggatttattcttgaaggtacaaagcattctatttagaaaaagtaataaagatgactttttacctgccggtcgtataataaatgaggaacgctatcctttgagaggacttttactatgtccaaagtgtaataaaaacttgacagccagcagtgcaaagggaagaagtaaacattattattactaccattgtacagttgattgtggttttagacacaattctgaaattgtcaatgatttatttgtggaagaactttcaaaattcagctttaacaatggtgcaacaaaaatattgaaagcaatatttattcaaaattttgcagttgcgtcaaatagcgttggtgatgaacgcaaagtacttcaaaataagcttaatggaatagagcaaagaattgaaaaagcacgagatatgttcattgaagataaattagatgaagaagattttagaagcataaaaaataaatacaaaactgaaatagaaaatctgaaggttaaattaagtgctttaaagagttcagctgaaaataataattttgaacaaaggataaataaagcacttgattccattacaaatatttctgaaagatataagaatgcgaacacaatggataaaagggcaattgttggtttgatatatcctgaaaagttaatctttgatggagagaattttcaaaccacaaaaatcaacagttttgctaatggtatctttttgattaagaaggagttaggaaataaaaaaaaccgacaaagaagtgaattatcttctaatgtcggtcttgtgagctcgacaggattcaaacctgtaaccttctgagccgtaatcagatgcgctattcagttgcgccacgagcccgttgtttccttatcgtttaaaggtttgcaaatatagcacttttttcttttctttgaaagatgaaaccgagaattttactattaatcgcgtttttcgcgctaaccgcttgtaaaagagagacaaaaaattcaccttcggaagctgtttcagtttcaaatttggtgcagtacaaagaagagaatggaggaatacacataaaatccggaaatttcacctatgatttcaagaaaaatcagattccgtttaaaaaaattatcctgctgaatgcaagtatggcgggttatatttcagagctgaatgcagaaaatctcattatcggcgtatcaaatcccgaatacatttattcagaaaaaattcagaatttaattaaacagggaaaaattcagaatttgggaagcgagcagaaatatgatgttgaaaaaattatttcgctaaaacccgacgctatttttaccaatcatatcgccagttttgacaatacgtaccaattgctgaaaaacaacggaattcaggtcatttttctggatgaatatctggagcagaaacctttggaaaaaacagcctatatcaagcttttcggaaaacttttcggaaaagaaaaagaagcagatgtaaaatttgatgaagttgaaaaaaattacagtgatctgaaaaaactggcgcttaccgcaaaagaaaagccaactgttttggcgaacgaaatgtatggagatgtttggtatcttccgggaggaaaaacttctgctgcaaattttatttccgatgccaatgcagaatatattcttaaagacaatacagatcagaaagccgtaaccatgagctttgaagaagtatttgcaaaatcaggcaaagtacaatactggattaatgcaggaaatcatatctccaaaaaagacatgttgggcatgaatcctttttacagcaaactggaggtattcaataagggaaaaatctatgtgattacgggcaaggaaaaagggcaggcaaacgatttctttgaaagcggcgtggtacgtgcagatttggtattaaaagattatattaaaatttttcatccggaacttttacccgattatcagcttacttatatgaaagaattgcgataactcggagtatttccttatttttgactttctttttttaaaattatgtggaaaaaaattaaacagattatattcgttcttcttattcttaacgttgtttttattgtttggggaagatttttcaatcctcccatcacgctaacccagattggaggactcttcgaatacggaaggttgcagagagattatatttcctatgatgaaatgggaagtaacgtaaaaaaagctgtaattgcctctgaagatcagaaatttttcgatcatgatggttttgattatcaggcgattgaaaaagccatgaaaaacaacgaaaaaggcaaaagattaaaaggaggaagcaccatttctcagcagactgcaaaaaatatttttctttggcagggcagaagctggatcagaaaaggactggaagcggtgtatacttttatcatcgaaaaagtctggaacaaagacatcattcttgaaagatatctgaattccatagaaatgggacagggagttttcgggatagaagccgcttcggaatactatttcgggaaatcttccaaagatctcaacacctcggaagcagcgtggattgcagccgttttacccaatcctaaaaaatacgatcctaaaaatccatctccttatctcagaaagaagcacaactggattatgagacagatgaggaatgtgcgtttgaaatagtatctttgcaccaatgaaactctttaattccagcacaaactttgagtcggttcttaaaaaatatttttcttttaagaatgaaacgctttcgctcgatccgtttgccgaaattttagacagtgcaaaaaggtcagactttgcagaggttctccgttttttcagagaaaatcctgaaattcttgagaattttaaatattatcttcaaaatatttttaaaggaaaagcgtttaatttatcacttacagaagccaatattttatcggaaaacgcctttattccagagctaaaaaaaagaattctgaataaagtgcttccaccggtcgttaacgaaaatacgatctggtatatgattgataatgtaagtcttactcccaaaaaagatttaagcttctttcataatcttcctgaagatgaactggatgaactcttcagacttttgggaatttcagatttcatcatcagtcccgaagtgaagaaagaaatgctgttctccatgaacatcctttcgtggcgtgttacaggggcagcgatggaagttgaagtcgtaagaatggctcctcagtacaaaaatttcgataatccttttctggcattgcaaaatgagctggaagaactggctgcagatttcgaaaaagacaatcagcttcagttgagttccaaaaacagccgttataagcagattaaaatttatattgaacagtgtctggaatttgtaaatattgcctttaaaaactcctcaaaatacggaatttcggggaaaatcaatcagtctcttcttaaaatccgccaacaggtacagcgaatttttgaaatcattcagcttttggttatcgatgaagaaaaagatattttgttgaattccaaacagttggtttttaatattttaagctataaatctcacagaaataacatttctgaactcatcaacgacagtacaaggctgatttcgcacctgatcacgaatcacactgccgaaacaggaacccactacatcacttcgagccggaaagagtacatgacgatgttctacaaagcgagtggaggaggaattattgttggtgcattgtgcgtactgaaaatgctgtacggatacattcccggaagcgatttttcccatgcctttttatattctatgaactatgcgatgggattcgtgatgatctatctcatgggtttcactttagcaacgaaacagccagccatgacggcggcaacgatgacgaaagttttggcagaagaaggaaatatcaaaagcagcagtacagagtttgcccatttggtttccaaactattcagaagccagtttattgcttttgtcggaaatgttttgctttccttcccgattgctttgctgattatttacggactggatgtatttttctcgcaaaatttagccatagagcgatcggataaattactgaaagatttggatccttttaaatctaaagctattcttcacgcctgtattgcaggattttatcttttcatttcaggaattatttcagggaatattggaaacaattcggttttctatcagattccggaaagaatagcaaaaagtatttccatcagtcgtttattcggtaaaaatttcgctaaaggattatccaaatactacgcgaaaaactggcccggaattgtttctaacttctggttcggggtatttcttggggcaacagctccggtaggattattcttaggactggatcttgatattcgacacatcacttttgccgcaggaaatttagctttgggattgtacgggaaagatttcacaatcgattcttataccttcttcatttctgtggtaacggttttcctgatcggttttttcaactttctggtaagtttcagtttgtctatgtttctggctttcagatccagaaaactgaatttcggacaggttggagaattgtataaaggaattttcaggtattttttaaaacatccgctgaagtttttctttccgatacgatccggtcttgataaaaaagcagacgaactcatgagcagtacgaaatctgccaaacctgaagaagagtaaaatctgatttttacaatatctgaagatcattaaacttctccacaccgaatttatcctgaaattttctcaggaaaaagcttttccgcatctggaaatcatgcttcaaaagcggcgagttaatttttataaaaacgcatttgttttcaatatttacactctggatttcgttgaaaaggctttcatcaagataatccgaaagaaaatctttaatctcaaaagctaaaagtttatgctcaaaaccatgaattttggcaaaagattttacaagttccgaggactggaattcacgttttttcttcttcattatttactgatgtattgtgtttgcaaacctttgctttggaaaaatttttctaattcaggatatataaattcacaggcttttttccagttgaaaaattttgaaggatagctttctacatttccgcactcaaagcaaatttcaattatttcgaatattctgtcgttttcatcataaaaaacaattgcatttcttgggaaaaagcatcctgactgagaaaacatagtgataacatgtttattacaggtattaaaaataatatgactgagttttgatatttcttctaaattcagagttttagattcttcaatttctttttcagattgattttctataatctctctgaaatctatggacttgggaagatgataaaattcgttcaattgtacagaatcttcttttgtttttggcggcggtggtggcggtaaatatcctgaactctttttaaaatttaagttataagaaacgattttgattttacttgctttattaaaagggtagttttttattctctgacctaatgaaaccggatggtaatttttattgatttcgccttctgaaaaagcaaaagcatcaagcaggtctttcggatttttcttcttttgacctgaatgaaaacaagaacaaaaagcaaaaaataaaaacagtatatttttcatggtctaaatctcaaaaatgatactttcctcattaatcttcttcaccacactttccgtgcgttcacgatgtgtatccgtaataaaaatctgtccgaaattctcctgattcaccagttctatcaattgagaaacacggctgtcgtccagtttatcaaaaatatcatccagcaaaagaataggcgttttctttgttaattcttttataaggctcatttgtgccagtttcaaagaaattaagaaggatttctgctgtccctgagaaccgattttcttaattaagacagcatccatttcaaaaagaagatcatctttgtgaattcctttcgaagtataagtaagcattctgtctctttccagactttcttttagcagattttcgaaggaattttcaagcaaatgagactcataaagcacagaaaccgtttcttttcctccagaaataatcctgtagaaattctgaacaatcggatttaacttttcaacgaatgtttttcttttagtaaagatttttgttccgaatttaatgatgggatcatcatagatttccagtgaatctttatcccaaaccctgtttttggcaaaatattttagcaaagcatttctctgctgaatggttttctggtactgaattaaatcaaaaagatactcagaatccgtttgtgagatcatcgaatccagaaattttctcctgctttctcccgaatctgaaattaaatttgaatcatacggagaaatcatcacactgggtaaatatccgatgtgatccgccattctgtcgtagctcttatcattttttttaatgacttttttcgcttctttaggctgaagtactttgatgttgtcttcactgtcatcattctgaatttcagcatctatcgtaaagaaatcttcgtcatttttaatattgttgagatccgtatttcccaaaaaacttttgcctacggaaagataatgaagcgcatccagaatattggtttttcccacgccgttgtttcccacaaaacagttgatctgcggcgaaaattcgaattttttctcggtgtggttcttaaaattgtacagggaaagcttcttgataatcattcgtcaaaaatacttcattattcctaaaaataaaaagggaagtgccgaacaagtttctacaccaaaagaaaaatacagatcatctctttcgttttcagagaaatagatgaaaatatacgtaatgatgcttgaaagaaaaaaagcaagagcataattgaaatcaagataaaaaacagataaaatattgctgataaaaataagcagatacgccagatatttagtgttctgaatgccgatcatcgagggaaacgttttcacggtatcaacattcatatcccgaatgtcgaaaggcaaaaccaaagccgtaatgaagaaaaagctgatcaggaagatcgggatgctgaattccggcaacgtaagccagcaattcatcagtccccaaaccaaacctacataaaatacctttagcagagggattttccggatataaacatcaagaaaaaagctgttgtacagtaaacctaaaacaacgattacaaaccatttcatcaaccgtatttcgttgtgattatgaataattaacaacgagcagataactcctgcaacagcattcagaaccagaattttaaaaaaatgctttgttttctgatatttagtgtacagataaccgctgaaatacgttataaaaaggaggaaaaccgttggatagcggaacgtgttttgctccaacatgaaaaatactgcaaaaagagttcccgttaaggatacgtaaaactgactgtctataacggattttttcagtacttttaagaaattcatttatcaaaaataacatatatgaaaagattttccaagatttttatgcttttgcttctcctgctgaatttttcggggatttccgcccagaaatattatgaagagcaatggaaaaaaatatcagcaaattcccagaaaggagcgtataaatctaatcttcccatcatttcagaaatacagaaacaggcgatgaaagataacaatactttacagcttatccagtctttaaaggcagaatttagtatcgtaaaccaaacacaggacgatgaaaagaacgattccgtaagcaggcttttcaaaaaactgagtgatgtagaaaaacaattgaaagacgatgacaggatattatttgaagttctgctgaatggttttttcctcgattattacaaccaacattcctgggagatcgaacagcgtaccaatatcaattctcaggatctctcgcagatcgagacatggagcaagcttgattttaaaaattatctgaataaaaaatatcaggaatttgatctgcaaaaagataaaattagaaaaatttcactgatcaaatatgagaaggctttttcatacaacgattatatttcttatttcccgactttatgggattggtattctaccaaaaagatcgaatttctttctgataatagtctctttaccaaaaatgaacttacggaaaatcaaataaagattaacgcgatctatgatgatctgatagcgcagaattcgggaaattccaaattgtatttcatgcataaaaaattgcaggataactgtaatttcacactgtgtaaagatcgtctgactcagcttcaaaaccttttgaaaaccgaaacggaaggtgattataaagtgctgatcatggaggatatcatagagcagttactttcccaaaaaaaggaaaaagaagctcttgcagttgcggatcaggcaaaaacgaagtatgccaaatctccttttattgataatatcaaaaataaagaaaaccagatcctgaatccgtttctgaatattaaatatgagcagcagacccaaagcaaaaagccgattcattttgtggcagaatataaaaatgtttcagccttttctattaatatttatgaagtaaaagaggatctcactacttttttgcagtacgccaaaaactcgtattctactaaatttaataagattaaaaaaaatctggttaggaaagaagcttataaactggatgatccgaaagattttaaaaaccataaaacgtccttagaaatacaatctcttccgccgggaatttatcttgccgaatacaacgttgccggaatcagcgacaatgaagccgaagcggaaaaagacttttattttctggtttcggataacagaattatttatcagtcaaaaacagacagacatcagttatccaatcaattgaaattagtgaacagtgaaaacggacaacccgtaattaacgaaaatcttacgttttatgaatttgtttccaataataatttaaccaaaataagcggtaaaacagataataacggtattttcagatttcctgcgacaaaaaacaatgattattacagaacattcctgatccgacagccaaaaaccaatgatgtgcagatcatggaagtctatggagaaaggggttacaatagtgatctgaacatagaaacaaaacaaagcaaggtacagattttcacagaccgggcaatttacagaccgggacagacggtttattttaaagttatcaatacacagcgtgataaagatatagaatctgtagttgccggattaaaacagaaaattacattaaccgacaccaacggacaggaagtttcctcgcagacatttaccaccaatgaatttggttcttatcacggaagttttgtgcttccgaaaggaaagctgaacggaactttttatttgagaacagatggaaatgaagggtataaaaatttcagagtggaggaatataaaagaccgaaatttgaaatgacgttcgatcctgtaaaagatgagtacaaatacggacaaaccatagaactgaaagggaaagccatgatgttttcgggagtcgctttaagcaatacaaccgttaattatgaaattaaaaaacgaaatatccgctggagatatttttcatggtatccgcaaaatgatgatgataatgaaaactcagttttgggagaagcaaaaaccaatgaaaaaggagaatttatcattaaaattgatcctaaaaaagacgaaaatgtagaaggaattcagattgataattatgaaatcaatgcatccgttacagatatcaacggcgagacacagactgcagatacccagttgaaagtagcttccgtttctcactatattcaggctgaagaaataaagaatgttttttctgatgaaaatgtaaaactgaatgttgaaacaaaaaattataacgaacagcttcttaaaaaatcgtatcaggtaaaattatcaaaactggtttctccggacagaattttcagacagaatttcaaatctgaagttcaggatttaccaaaattctcaaaagaagaattcatcagcagatttccgcatgatttttacgataaaaaggacgagcctaaaaactggaaatcaaccgtaattcttaagaaaacacaacagccaataactaacgaccaacaatcatcaaccaatctggacttaggaaaactggaagccggagattatcagttggaactgtataatattgaaggaaaagacacgataaaaacgctgcagaatttcagtgtttgggacaaaaaaacacttaaacccgatcaaaaaactttcctgacggttgtacagtccaaaaaagagctgaaaagaggagaaaaagcagtatttacggtttattcgtcggttccaaacgctcttctgaatatttttgtacagaatggttcaggaaaaacggtttctgaagttttgccttttaaaaacggaatgctagaatatacagcagatattccaaaagataaagatgtacgaattttgaatgtacagtttcaggtagttgtctttaatgatgttcagacagaatctgtaaatctggatatagatgatactgatcaatccttaacgattgaaacccttactttcagagataaaattcagccgaattcaaaagaaaaatggtctgtaaaaatttcaggaaatgagaaagagaaaattaacgccgaagttttagcgaatatgtacgatatgtctttggataaatttgctgttaatcgatatgactggtacactttatatgctccgtttataagtacagtatcatacgaactgagagattatctgcgacaaaaaaattaccagaaaagattagattatttttcgggagaacaggttgaggttcctgtttttgactggtttgacggaagtatattatggatgtataacaaaagtaaccttttagaaaccagaacaggaatggttaatgtagaaggtgtaaaagcagcggcatatacaccgccacctccgccgccaactaaaggcgcaagaaaagatgttgcaatgaaagtggcaatttcagaagataaaatggagataattcaaaatgttgttcctgaacctttaaaagcacctaaaatagaaacacctccgccaacggaaactattttaacccaagttcccgttcgccaaaacctaaacgaaaccgcgtttttctacccggatttgaaaaccgattccgaaggcaatgtaagcttcgaattcacttctccggaagcactgacaaaatggaagctgatgtttttggcgcatacgaaagacgcaaaatcaggaacactggaaaaagaagtcgtaacgcagaaagaattttcggtaacgccaaactacccaagatttttgagagaaggagatgaactgaatcttcaatccaaactatcgaacttaacgagcaaaaaattaaacggttcagcaggtttacagattttggatgcgttcaccaatgaagatatttcgtctcagtttggtttaaattcaagcattcagaactttgaattaaatgaaaacggaaattcagccttggcatggaaaataaaagtgccaaacaatttttcctccattattttaaaagtggtggcgaaagcaggacaatattccgatggagaacagaaagctgttgcagttttaccgaacagaatgctcgtaaccgatgcggttccggtttttgtaaaagaaggcgaaaccaaaacatttgaactggaaaaccttaaaaatgcaacttccaccacgatttccaatgtctccaatacgctggaacttacgaccaacccaatctgggagatcatgtttgcgcttccgagcctgaaaaatgaccagaacaattcagcggatgtgatctttaacaaatggtttgcggatgttttggcatcagaaatctttaaagccaatccgaagctgaaaaccgttttcgaagaataccagaataaaggattattgaattcaaatcttgaaaaaaatcaggaactgaaacagttgcttttggaagaaacaccgtgggttctggaaagcaaaaatgaagaagaacaaatgtcgaaactggctttgctgttcgatgtcaattcaatgaaaaactccattcatcaggattgggaagatttagagaaactgcagaatcctgatggaggattttcgtggtataaaggttatccgagttcatattctacgtcattgtacattcttaaaaatttaggaaaaatcaatttttggctgaaagataacataaaagattaccaaagttctgaacagaatgaaatggtttctaacctgatcaaatacgtagataatgaaattgaaaaatacacttcgacttcgctcagtgcgggaaaagaaaatgtaatcaataactggactttagactatctcgacacccgaaattactgggaaaaacagtatccgttaaaaggaaaaggagccactttaaaatccttggtaaaacagaaagtaaaaacgatgaaaattacagattttaccttcttcggactgcatcgtgccgctttactgatgaacgattatggtttaaaagaagtttcagataaacttttaaattacctgaaagaaacttccgtagattcaaaaacgcagggtgtttactggaaacagaatcttgatgactggggctggttcagctcgaaagtggtgaatcatgcaggagcattggaagcatttaataaactgaaaaccaacgatcagaagttcattgaagatttgaaaatctggctgattacacagaaagaagtgaattcatggggaagctcaagaggaacttcggaagttatttttacgattttaaattcaggaaaatcatggacgaattcggaaagcgataaagcaaccattatttggggcggaaaagagcttcagccacagactcaggcaacggggtatgtaaaatctaccgtgaaatcggatgttttagataagaatttagccaccgttaccgtcacaaaaccgggagcaggaattgttcagggaggtttgttctggcagtattacgaagatctggataagataaaatcttctgaaaattatctgtccatcaccaaagaactgtacagaaaaataaaaaccgtgaatggggaagaattgcagaaaatcactccggaaactccgttaaaagtgggcgataaagtgacggtacgaatgattttaaatactgaccgaccgatggaattcatccacatcaaagacatgagagcagcaggatttgagcctttggatgtactttcggggtatcagtggaaaaataatttggggtattatcaatcgaccaaagatgcttccacgaatttctacattgaacagatgccgaaaggaaagtatgttttcgaatacgattacgttgccaatgcatccggaatattctcaaacggaattaccacgattcagaattattacgctccgcagatgaatgcgcatacgaagggagatgtggttgaaattaaaagcaactaaataataaaatcaccgcaaatcctaggatttgcggtgattttttaatgataatgattattaaagttaaacgtttgtttaatttggaacagtttttgacctgaataaacttataaaataaatacaaagcttatgagattttcaaaaacaattatttcaggattgatgctctttgcagcagtgaatacctttgcacaaaagaaaacagaaaaattcgagaagttacagatcgaaatgttcccaaaagcgaaagaaggttttaagcaggtttatattcagcttccgattgctaaaaatgaaaacgaccttaaagtggaattttttgtaggaacagaaaaaatgctcgactgtaacaaacactttttaataggaaaagtcaatacgcaggatcttcagggatggggttataattattacgaagtagaatccaaaggagaaaccggaggaactttaatggcttgtccggatcagaaacttactaaaaaatttgtttatcttcagccggaaactgtacgatacaacagcaaattaccattggttttctacattccgaaagatatggaagtccattacagggttcttcgtcccgatgcgatgaagaaagctgttcagagataaattaaaatatatataaagtcactttttatgaagtggcttttttttatctttgaaaaaagaagaataatgtatacgatattggatttagaaagccggttctcaaaacaaaagatcaacaaggcaaaaaaactattgataagggaatttgaagaagagaaaaaaaatcatttcatttgttttgttgatgatgaaaatgaatcttatgacgctagaattgtattaaatccgaaatccgaaattacagaatcttcatgtgattgcgaaagcaaagatttttgtctgcatcttttggcaatgggacttttcatgtcagaaaataaatcgggaaaaataagttctcaaaaaacgacaaagaaaaaggtttctgaagctgaaatagctatggaaaatctgaatgcagaagaattgaaaaactggctgctgttgttttttaagaagaataaagaagcagaagttctgtttatgatggactttggagaaaagaaaaagtctttttccaatgaggaaatttctgaaatcataaaaaataccagcaattctgttgccgggaaaaaaagaaatcttacagcacaggatgtaaaaaaaatagttgatcttcttacaaaagcgttagaacctgtagaacagtatctttttcagaataatgataagcaggaaagtattgataaatttatggttattaatgatgaaatcagcaaatataagatgaaggtttctttctcaagcacgagatttgatacttttcatgaaaagctaagagaaagattcgtcgctcatctcaattctataaaagattttgagtattggaaagaaattgcaaccaaaaactggaatgtctttctgaaaggcaaagattctatacgttttcatttttattatttcattaaagaaatgtatcattctggtgatcgtcttcaaaaacttcacattgccgggttgataaggcaggaaattttgttttggattaaaaataagtttaatttaaaagtttctcttagagaagatctgttggaaattgttgccgaaaataatttttttgaagaactgcaacaatactttcctttggagcgttatgaaaacagctacaatctaaaagtgattgaagaaattttaaagattgatgaagataaggcagaaaaagtttgtaaagcaattatcaaaataaatacaaatgataaatacaatcttccttattataatgtgcttgaaaaaatctatcagaaaagaaacagcatcaaagatctggcatatattaaaagaatgaagttttgggaagacccgtctattgaaaactatatttttattgcggaaaatgatgaagatactgaggctttaaaaaaattaagaaacagaattttgtcaggtttaagaggttctttttatagctatccggaaaatacggagctttactttgctattatggattatgaaaagaactataaaaaaatgctcgatgttatcaatcgtgatgttccgacttcaataataaatcaatacgctgaaaagatgtttcttacaaataagcggggttttttaagttcagcaaactcacgaacagaatggaacggttctgaagaggaagaaaatattctggcagattttttagtttcgaaatatgacagcgctcaattggaagaatttttttctaaaaggttttttggttttggagccgatcggttttcgaaaattgttctaaataaaattaaaaaatagaatctaaggaagaatttactaatcattctgtacttagttttaaagagtgtaagtaaaaaactgatatatttgtttttttaacaattaaacaagctatggaaaacgtttttgatgctaaagatgctcagaattacattgataggattaacaatcttacgccggaaaccaaaggattgtgggggaaaatgtcagtagatcagatgttggcgcattgtaacgtgtcttacgaaatggtttacgaaccggaaaaacataaaaaaccgggagctattgcaaaattcatccttaaatcgttcgtgaaatctaaagtggtgggagagaaagcgtatcctcagaacgggccgactgcaccgcaatttattatttcggatcataaaaactttgaagaagagaaaaaaaggctcatcggttttatccagaaaacacagcaattgggagcttctgcttttgacgggaaagaatctttttccttcgggaaactgaaagcacaggaatggaataatatgtttgcaaaacatctcaaccatcatctcgctcaattcggggtttaaaaaactaaaaacaatatgaaaaaacttttattactttttgtactttgttccaatttcatctttgcacagatgcccgatatttccaatgtctggctgaataacagcaaagcgtacacaggaaccatcggaaacaaaaatcagcagattaagctgaaaatcaacatttccgagcagaataaaaaaaacgatcaggaatattttgtttcaggatatactcttgttgataaaacgtatgctaaattcgaaggcaaattcatcattaccaaatataaggatgccaaaaaaagaggaaccgttttcggggaatacgaactggcggaagaaaacaaaggaaaacattccggcattttaaaaggaaaattcatctatacttttaaatggaataaagatgctgaaaaagtggaatcccagtatatcgaactgatcggtgactggaagagctacgacggaacacttgattttaaaacaagaattaataatcagtaatcatcatgttaagaagaattttagcggtaatcgcaggaatgatcgccggatccatcggagtctggctgatggaaagactcggtcatgcgctgtatccttttccggcgggtttaagaccggatgatctggaaggtttcagagcgtatgtggaaaatttaccgttcatgggaaaatttatcgtgattctcggttacgctttgggagctttgcttgcaggatttatttccactaaagttgccaacaacggaaaaccaacttctgcaatcatctgtggagttattttcactttttttaccatttacaatatggtgatgcttccgactcctttctggttctgggttttgggtattgcagtgtggggattggttttggcaggatacaaattggcattaaacaataaacaagtatgaatttaggtgctttttcaatcagtctcagtgtaaaagatcttcagaagtctaaagatttttatgaaaaattaggattcagccaaatggctggaaatatcgatcacaactatcttatcatgaaaagcggcgaccatattattggtctttttcaggcaatgttcgatgggaatatgcttactttcaatccgggatgggatcagaacgcacagaatcttgattctttcgacgatgttcgggaaatccagaaaaaattaaaagaacaaggtctggaattacagaaggaagccgatgaaaacacttccggtcctgaacatatttacctgaaagatccggacggaaacatgatcctgatcgatcagcacagataaggttttactctttttataacctcacaaaatagcagaatcaaaggtttttaataactaaattgttctttttatcaggtttaaaaatcattttaaactcattttaaatttaaccgcaaaagagacaaaagactttattggatttatttaaagtatttcaaaagtctgcaaattaaaaaaatctttgatttttttaatttacgtgctcttttttccatttaactattaaacttaaaaaactaaaatgtcaaaatcttttgcggtaaaaaagcttagacaagttaaaaattaaaactaaactataaaaaaagacacatctatggcaacagtaaacgtttatctaacatttaacggaaattgcagacaagcattcgatttttacaaatctgttttcggcggagaatatccttacatcggaacattcggagaaatgcctccaatggaaggtcaggaaacaaaagaagaagacagagacaagattatgcacgtttcgcttccgatttctaaagaaacgattttaatgggaagtgatgcaggttgcgatcacgctgctcatctggtgatgggaaataacttttcaatttccattaatgcagaatccagagaagaagcggacaaattattcgcgggactttccgaaggcggaaaggttaccatgcccatgtccgatacattttggggtgcttacttcggaatgtttgccgatcaattcgggatcaactggatggtaaattacgacgatcctgcaaaaatgcagcagcatccttagaatggtagtagaaccttaaaactgacgaatttttgtcagtttttttatcttctgttcgtaaaccaacataacttctacaggctcattttataattatcgacattttttcattttaaactaatttcagaattaaccacaaaaggcacaaaagacaatgttaaagcgaatttcattgataatcaaagccctcaaaagaataaaaatcaaagatttttaaaaactattgtgaacttttagatttataatgatcaactttaaataaaagtttagtcatcttttgtgacctttgcggttaaataaaaagttggggcagcataaaatatgcagtttgttattattgatttgaaatattaaatttgttgaaaacgatagataatagtaatataattatatgagaaatattttaaaaaaggctgttttgggaatttttacgttgggagcaactttttcacaggctcagaaaagtgatttgggagcgtggtatatgtatttcggaaacaataaaatcagtaaaaaactgaactttcacaacgaaatccagtatagaaatttcgacggaataggagacttggaacaattgctaatccgcaccggaatcggctacgatcttacggaaaacaacaataatgttttattgggttacggtttcattctgagtcagccttacgtgaaaggtgagaaaacagaaaatattgagcaccggattttccagcagtatattacaaggcagaaattcggacgttttaatattcagcatcgttaccgtctggaagagcgttttctggaagatgatttcaggatgaggttccgttattttttaggatttaatattccgatcaataacaaggaaatgctgcccaaaacattctatgcatcggcttacaatgaaatttttcttcatttcgacagtcctgttttcgacagaaacagagtctacggcgctttaggatatgtcattaataaaaatatgagaattgaagcgggatacatgaaccagattcaggaaaacagaaaccgcggacagatccagatcggattttacaacaatattccgtttaccaaaaactaaaaatcaattgtacatttaaatccgaaattcattttaaaaaattaaaccaaaaataaaacacttatgcacgcaggaaaaagatttggagccatagaatttatactctggaccaagagaagcatcattattttagccgttttgtcggcaattcctaccacgatgtattttttaggatggaagtttatctcctttccttggcagccgattgccatcatgggaacagcagtggcattcatcgtaggattcaaaaacaatgcaagttacagccgtctttgggaagccagacaaatttacggagccattattaacgacagccgcagtttcggatatattttaagagattccttacgcgggaaaaatcctgagaaagtaaaaacaatgttcgaacgtcactatgcatggcttaccgctcttcgttttcagcttcgtgagccgagagcctgggaaaatatgaatacgcctcagtttgacgaatatgccagaaaatatgaagtttcagaaagaatttcaaaactggatgatgaactaaaaaattatctttcggatgatgaactgaagtatattttaagcaaaaagaacagagcgacacaattaatggcatttcagagtaaagaactgtctgaagcgtatgcaaatggtgaaattaatgattttcagtggacgcagatcaatcagcagttggtgaaatttacagacaatcagggaaaagcggagagaattaaaaactttccttatccgagaaatttttcgtctataaccacgtatcttttgttgctgtttatcatctttgtacctttcggacttctgaaagaatttgataaattaggagaaggaacttcttttgaaggttttacaatatggtttaatattcctttctcgcttttggtaacgtggtgttttcatacgctggataatgtgggagaggcttccgtaaatccttttgagggaagcgcaaatgatgttccgatcacgcagatcagccgaaccatagaaattgacatgagagatatgctggacgaagccaatcttcctcctgccattgttcctaagaataatattgtgttgtaagagcattttttaaagcttaatttactaaaatcttaaacgttaaggtgaattgaatatctcattaagtctttttacgttccgtttaagtcttattgcattctgtttaggtctttttattaaagttttaagtattttagtgaaatttttagatgttttggcaaaaattttatctttttttattaaaaatttagcaaaaaaaatcagaaagttatatagaccttctgattttttgtttttgagagaatcaaaattattgcaggattttaagtttatattgaagtgaagggaaattgatgaaagtccatttctgggtataatctgacttcataaattctttagtttccgaattacaattcaaatttataacctttttagccaaagtaatttctttatctcgtatgtaaaaaagaataaaaaatccgttttcaggatatacaatcgcctttggtaatacaatttcaaaagatccggtctctatatcactaatatttttttcaaactttaaaagttcagcatcatctttaggaaaaccgtttttattttcataaatgaatatttctaatataccattttctaataatatttttctcgggaaaacggttatggatttcaaataggattttttgttaaaatggtttggaataaaaacagctttctttatattagaaaatatagagcaaacatacctcgacttctttttattctttacagatatttcttctctactattatttacaatattaacagcttcaatttcctgaactttatcaaataagatcatactgtctttttctaaggtaaaatcatatatcttgttttcatacaatattttatcattagatttatacggatacttttgaaaattatttttattgagtaaaactttatgtgaggaatttacaataaatacagaatcaatttgtttaccatcagaaaatcggatgatgttctgtgcattaaaaaagcacattagaagggaaaaggaaaagagcattgctcttttccatatacataaaaacttcatataagtattcttaaggcatatcacaatgtgctgcataaattggctccgattcataagtagaaactcctatccaaaaaatattatattctacaatccatgtttttataaaacgaggactgccatcaggaaatggtgtggtttgctgacaacttgctacccctacaatttggcttccccaaaatcttctttccgtttcggaggatgaaccgtttccatccgttgcagatgctaatgtaaacacagatgctaaagctaaagcaccaatcaaaattttctttttcatgtaattgaatttttaaagttaataaatatttttaaaaaagtgattgtttttaaatcacgttgccaagatataatcttttccctttctgtacaacaaccggcagttataaaatcgataaccgttggttataattttaaaaaacattactttagcatttaaatcttgaatgtatgagtttagaaacaaagcttcgaaagctaagagaacagaaaggctggtcgcaaatggatatcgcacatcagcttgatatttcccagcctgcttataataaatgggaaacaggacaagctaaacccactttgcaaaacctacagaaaattgcagaaatttttgaagtggatttctttgatttgattcaggaacaaattccaaatgtagacttatcgaattcacaatttgaaggaaattcttacattgtaaatccaattgttataaatcctacagaatcaaatatatttaactttcaatctcaagatcttattgaaaagattttagaaaatcaggagcaaatggcaaaaataatagaaaatcaaagtaagcttatcgaaagtttgttgaaaaaataatttcagaaaatttaaataccataaacctctgagtttttataaaaacaaatagtcttactttctttcatcatttttgcattcaaacattaaaaaacagaaatatgagtcatccaattattgtagagcagaaaataaatgctccggtttataaagtctggagagcattaaccgataaaactgaaatgcagtcgtggtatttcgatatttttgattttgaactgcaaaccggcaaaatattcaatttttatgaaccgggggaagagaaaaagtatcatcatcagggaaaaattttagaaattgttcccaatgaaaaactgaaatattcctgggcttatcccgaattttccgaaaaaaaaacaatcgtaacctgggaattgaaacccgatgaaaacggaactttagtaaagcttattcacgaggatattgatcattttaacgatctgggcgaacatttttcaagagaatctttcacgcaaggctggaacggaattttgaaggaaagtttaaaaccctatctcgaaaattgataaaataggagattcaaaatataaatgatggcaaaattcaactcccttcgtcctgttttatggacggaacaattcgatgaaacaatcgccttttatacgcagattcttggttttaccttacaggaaagaaatgatgattggcaatgggcttctttacagaaagatgaggtagagatcatgctcactaaaccgaatcagcatgagaaattcaacggaatagggtttacaggttcgttttattttaacatagaaaatgcagatgaattatgggaagagctgaaagataaagcaaaaatctgctatgaaattgaaacgttcgactgggaaatgagagagtttgcgatctatgacaataacggttatatattacaatttggtcaagatgtacatgaaattagttcagaggaataaattttgctaattttgggaaaattattttagaaatcaatgaaaaaaaatataatagcaggttttgcagcgattttgttgttggcttcatgtaaagatgataaaaaagtactggattctttggcagattacaacaactcgatgatggaaaaaggataccatttcggagataaactggatttgccgaaagaggtaaccgaagatgcagaaaccatttcgatcagtttcggagataaagaaacatccggtcttacgatagatcctaaattctttacattaggcgacaatgctgttacttttaatatcaaaacaaaaggcggcgaaacattaacgcaggacgcgaccattaatgtttttgccaaaaatcctgagcagaaaatcaattatgaaatcatcgccgaatatcctcacgatccgaaaaatttcgtgcagggtttccagattgaaggcaacacgatttatgaaagcgacggacagaatggttcttcgcagattttaaaatatacgttaggaactacaacgcctttggcttcaaccaaacagccacaggaagacttttctgaaggaagcaccattgttggcgataaagtctatcagttaacatggcagagcaaaaaaggatatatttacgataaaagttctttaaaattattgaaggaatttgcttatccgaatgttttgggtgaaggttggggattaacgtacgacggtaaaaacctgattgcttcagatggaagtaaattattatatttcctagatccgaacaatccttcaaaaatggtaaaatacattgccgttgcaggaagttctcaggcttacgatcagttgaatgaattggaattccataacggatttatttacgccaatgtttggcagaaacccattattctgaaaattaatcctgcgaacggagaagtggtaggaacttttgattttacagaaattgccaagcaaaataccaaaggaagcgacgacgtattgaacggaattgcctttaaaggagataatatgttggtaaccggtaaaaattggtctaaaatttacgaagtagcgatcaaataaattttgatgtcttctgtcttggtaatgaaaataaaaaacttaaagtgaagaaaagcctgatcgcaggttttgcagcagctttgctgttaatgtcctgtaaaaacgataaaaaaatccttgattctttggcggattataacaattcgatggagcagaaaggctatcattttggtgataagctgaatcttccgcaggaagttacggaaaatgcagaaagtatttccataagtttcggagataaggaaacctcagatttaacgattgatccgaagttttttgcgtatggcgagaatgaagtaacatttaatattaaaacgaagggcggagaaattttaaatcaggatgccaccatcaacgtttttaccaaaaatcctgaagctaatattccttttgaaattgtagcagaatatccccacgatccgaataattttgtggaagggtttgtgatggaaggaaatacgatttatgaaagtgacgggctggaaaaagcttcacaactaataaaatatactttgggaagtgcggttccggcgcagactgaaaaacagccggcagatattttctccgaaggaattgctattgcgggagataaaatttatcagttgacctatcaaaataaaatcggatttgtttacgataaaaatacgttaaagaaaatctcagaatttcctttgccgaatgaattcggagaaggttggggaatgacctatgacgggaaaaatcttatcgcagacaccggttcgaataaactgtattttctggatgtaaataatccttccaaagtggtgaaaacggcttctgtgggcggaaataaagaaatttacaatcagatcaacgagctggaatatcacaacggatttatttatgccaatatctggcatcagccttatattttaaagatcaatcctgaaaccggagaaaccgtagggaaatttgattttacaaagatcacggaagaatatactcagaataacagcgaacacgttcttaacggaatcgccttcaaaggagatcatatgctgattacaggaaaaaactggtcgaaaatttacgaagttgcgattaaataagttaaaatgaaccgcaatttctgttgaaataaataaaagcagtaaattggtagcgttccttttcggagcgctatcttagtaaaagaatttgaaattattatccttcatatttgcattggttttctgttcgttatctgcgcagaaagcccttcctttagacacgctgaaactgaaggaagcaaaagatatgcttgccgacgattacggaaatctgtacatctataaaaacaaagatttcagctttaccaagtacgattctttagggaggcagatcgggaaaatgatgcttacggttccttataaagtacagacggtacaaaacccgctaagtgtgcctttgttttctgaaaatgcacaggaaatgaaatttgtagaccagaatctgaacgaaatccaaaaggttgattttaaacagaaattcggttttatcaaaatggcttatgcggaagatctgcagcagctatggcttctggacgacagtacaaaacgtctgatccagtacaatttcagaaatgaaacgaccatcaattcttatcctttcgatgcgagcattgacgatttaatggatcttctggtgtacgaaaataaagtgtacgttttaacaaaaaaatacatccgcgtttattcattaaagtttgaaaagctgtttgaagcccctttggaaaacgcaaaacgtttcagacgggagaatgaatttatactggtaatcaccaataattctattttaaagtacattccggaaaaagaaatggtgaaaatttttgaagatcccgatgcacagattgtggataaaaatacactgtcttattttgaaataaaagctaataaactttacctttacagccttgaaaaaaacagggagtccaaaccacaaggagagcctgatcctaaacagaaagctgcggaacaggaagaagaaaaatcaatagaaaaagtggcggaacccgatagtcctgaaggaaaactggaaaagaaaaatcaggaaattgaaagcaaaaatcctgcggaaagttctcttcagaagcttcttgaagatacttcccagattcaggctgccggaatttagatctttattaaattaaaaatatactagggaaaatatgcacattgcagttacaggaaatattggagcaggaaaaacgacgttaacgacgatgctttctaagcattacggttgggatgcccagtttgaagatgtagatcacaatccttatcttgaggatttttacgcggatatgagcaagtggagttttgcgcttcagatctattttttgggaagcagattcagacaggtgaaagagatcagggaaagtgggaaaaatattattcaggatcgtacgatttatgaagatgcacacatttttgcagaaaacctgaacgatatgaatcttctttcggatcgtgattttaaaaactacgaatctgttttcaatctgatgaaatctttcgtttctgcgccggatttattaatttaccttaaatctgacgttccgaatctggtaaagaaaatttataagagaggaagagaatatgaagcatccatcagcatcgaatatctttcaaaactgaatcagaaatacgaaaaatggatctccaattatacggaaggcaaacttttgattattgaagtggatgatcttgattttgtagaaaagcctgaagatttcggatttattttagagaaaatcgaagccgaactaaacggtttgttttaacaaacttttattgtacattaaagcagtaatcgttttatttctttctaaatttgctaaagaaacagttaatttttaaatataaataatcatgttggtgaaggttttacataatgggaattgttcaaaatcgaaagcggttttagaatacctcgacgaaaacggagttccgtttgagatcatcaacattcttgaagatccgttgagtgagctggaaattaaaactgttttaaaaaagctgaatcagagtgtttttcacatcatcagaaaaacagataaattgtatcttgaaaattatgccgataaaaatttatccgaagaagagtggattaaaattctggctgaaaatccttccctgatccaaagaccgatcatcattaaaggttcggtagcgatgcttggaagaccaattgagaatgtgaagtactttattgagaaataaaaacttctttgaaaaatatactaaaaaagtcagccgtaaagctgactttttcgttttataataggatgacaccttctatttttgcgacttcctgataaatggttaccacctgatctgcatccagaacgaatgcgttaatattgcaggctgtgtattttccgtttttactttctcggtttcccagtgtaaatttgattccgtcgaaaactttataaatctccgtaagttttgcctgatcggtaggaataataaatttaaataaataatcttccggaaaatcgtgatgaccttccagtttttccctcaaagagttgtaaaaatcttcagggtttgcgtgttgatttccttgtaatatatccatctgctttttaaaaatctatataaatatagtcaaaatttttctatttcccaagtggtcccagaagcgacttggaattttggatctcataatcttcgatgatgttgaaaatcccgttcacaagctgttcagaagccagttggctcaatcctcccgaatttacagaagttttattgcctcctaaaagactgcccaataaattgctgcctgataaagcggtgttgatgcttttcacaatgccgtattgattaagctgttcttccactttcggagtaattgcggcaataagctgctgagaggttttttctttcagaattaaagttgccgttcccttttctccctgaataattcttgtgacatcatttgcattcaggctgttaacagcattcacaaggattggttttgaaatgtttacggtgtaaactgccgcatccgcaatataggctctttcttttgcaaccagagaaggtgcaattttttccagcattgagttgatgtctctaagctgcttcggaagagctttatccaccatattgttctgcagaaaagcatctctgttgctgtatacattaactcctttatcgattccgtttaaaagaagtcttttaataattgataatccaagatcagacgtagcgagagtcgtgcaggactgcatggttgtattgataactgctccggttcctatgataagagccgccgctataatatattttttcattgatattgattaaacgttaatggttgtcaaatactgaaccaaatttatgacagtagaattagtttaacaaattttattactcatattgttaaattgatgatataacaaaataaaatctgaatttgtggagttatagttgttaagatatttattataagtaaataagacgaaaatttttaattgaatattattcctttaaaattgagaaatatttaataattgaatttatattgagcaatttagtaattataatcaattattaaatgtctttctgtaaatatcaaatattaacagaatgataaaaaatttaagtataattaacattgttgaagatatttttataattttgactaatgtcttttattgagaatatattattttcctgtaaaaagacagtcggaagtgaagcttccgatctcagaaatgattgtacgaataaaattaaactatatgaaacaaagtgatttaaagtattcatgtctcattgcggttttatacttcggtatgaatgttaatgcgcaaactactccacaagatactgttccgaaggagcagaagattgaggaggtagtgatgattggatatggttctcagaaaaaggagaatgtaacggggagtattgctacaatatcttcaaagcaattagaaaatcagcctaatccaaatgcacttagttccgttcagggaaaagtagcgggggttcagattaccaacggcgctgctccgggagcttcaccaagagtcgatatcagaggaatcggaactttaaacggaacaacagtatttattgttgacggaagtataacagaagatatttcttttctgaatccgctggacatcgagtcgatgagtgttttaaaagatccttcatcgttagctatttatggagccaaagcttcaaaaggtgcggtgattattaaaacaaaatcaggtaaaggaagaaatgtttttaatttcaattcttatatcggattaaagagagtttccaacatacctaaaatggttaataaagatcaatatgtggaactctataatgaaaaattaaaaaatcagggttctacaacaggatttattaattcttctatgtttcctacgagcacaaactggtttgatgagattttcagagatgcaatgatcaactccaatgatatttctgcctcaggaaaatcagataaattaaattactttttaagtttaggttatttaacagatcagggaaatttagctgcaggtaaaggaatcaatagtggagacgagttccgcagatttacttcaaagattaatttaacgtataaattaacagatcatttaacggtaggtactaactcaacatggagtacaacacgaagagataatgcaaacaatcctacgttaacagcatatctttctccacctgtttacagtccaatgaacgcagatggaacatacggctatcagacgcttgtttcattggcgaacccaagagcgactttagatcttttcagaggaaaggataacggtaacagatatttaataaacctttggggagaatataaattctgggacgattttacatacagattaagctatactcaggataattctgatgtaaaatcttactcttacagcccggttatcaactacattcctgcaagtacttcacgttcaagcctattaagaacaaaccagatgctgagatcgtatgttttagataatactttaacatggagaaagcaattgggaaatcataaccttgaaattctggcaggtatgaccagaaacgaggattacggacttaatcttaatacttttggaagagatatcgtgtataacggtacagaacagtctttatatttttcaggaagtatcccaacaacaagcggcggcggaaataattacgcagacggagcttcttgggaggttggtttcagagacagagtacagtcttatttcggaagagtaaattatgattacaaagggaaatatctcatcaatgcatccattagaaatgatggaactacgggatacagttcggatgacagaacacattggtttcctgctgtaagtgcaggatgggttatctcaaaagaaaacttcatgagcaatcagaatatttttgatttattaaaagtaagaggaagctggggaagtttaggaaatcctgtaagaggtcttagctacgttttaaccacacaaaccggtctgaatgcttactttggaggggttgcttatccgggtgaaacaacgacagatattattgatacatcaatcggttgggaaactattgaaggaacagatttcggattggaaatggctttcctgaaaaacagactgaaagttgaagctacctattataacaaagattctaaagatgttgtatacggaattcagcagccttctatttccggagcacagaataaattggttaccaatgcattttcatttaataataaaggacttgaattctccgttaattacgaagcaaaccttaccgataaaattaaattcggagtatatggaaatttaactactcttaaaaatgaaatcacttctgtttataacaattcatataacgaaacaggaccttatttattcggaagtaccatcacaagattagaaaaaggtgttccggtaggttcatattacggattccaagtagcaggaatcttccagaatcaggcacaggtaaatgctgcgcctaagcaggttggagctgctgtcggaggatttcagttcgcagatattaacggtgacggagttattgacaattcagataaaacatacttaggaagtccaattcctgactttacttatgggttcggaattaatttatcaggatacaatgttgatttttcagttgatttccaaggcgttgcaggaaatgaaatttataactacaacagagagcagcgttatggtaacgaaagttgggatttagacttctacaacaacagatggagaggtgaaggtacttctaatacatatcctatggttaccaatgatcagaatattattaagccaaacagtttctatgtagaaaatggaagtttcttcagaatcagaaacattcagattggatatacattgccatctgatctgtttacaaatacaaagattcagaaactaagactatatgtttctgctcaaaacccatggacatcatttaagtataatggtttttcaccggaaatcttgaatacatcagaccgtgttcagttgggggtagatcaaaacatttatccattatcttcgatctacacaatgggggttaatttaacgttctaaaattaaaaaaatgaaaaaagtatcaatactgttattaagtctatttcttgcatcatcttgcggaaatgattatttagatataaaacctgaaactaaaaatgaagcagacaacttctttacaacagaagctgatgctgtgtctgcaacgactgctatttacagttttttaagaagttgggaaaattcagcatttccatctcaatatgtttttggtgttcctgcggatgacgtcctgaaaggttcaaacccgggagatgcatcatttatgcttgcttatgatcaatttacttacacagcatcagatggcggagtggaaggatactggacaggtcaatggaatgctgtggcaagatgtaatcaggtaattagtaacattcctaagattaccatgaacgaaacattgaaaaagagacttcttgcagaagctaaaatgctgagagcatatttctattttaatctggtaagaatttatggaggggttcctatttttgatggtattccttcagatttaaattacaatattcctagaaaatccaaagaagaggtgtataatttcatcatttcagatttaattgcagcttcagaagttttacctcagacttattctgctgcggatcagggaagagttaccaaaggcgcggcattaggattgttatcaaaagtttatctgtataaaaaagattatcagaaggcatacgatacttctaatcaggtaattgcaatgggatattcattagatccggatttcaaccatctattcagaatagcaggagaattcggtccggaatctgtatttgaagtagactgtgaatgttcttcattaggaggcagtcaatatgcagaagttcagggtgtaagaggacagtttggatgggggttcttcacaccttctccatctttggaagcagcatttgaaaccggagatatcagaaaagagcttaccatcttaagagatggagaaacaacgcctgaaggagatgttattgcggttggagatcctttatcagtaaaaacatttaatcagaaagcgtatgttcctaaaagtttaaataatacttcttgtggatatggctccagacaaaatataagaattttaagatttgctgaagtattgctaattaatgcagaagcagcaaatgaattaggaaattctgcaaccgcaattacgaatttaaataaagtgagaacgagagccatgttaccgggtacaacagcaactacacaatctgcattacgtactgcaatatggaaagaaagaagagtagaattagcgatggagggagaccgatttgttgatcttgtaagaacaggacaggcttccagtgctctggcaagctatggatttgttgccgggaaaaacgatgtattcccaataccacaaaacgcaatcaatcaaagtaatggggtgcttgttcagaatcctggatactaagcctcatgagaattaaaaattttataatattaacaactgccatatatttatgtggcagttgttcttctgaagatactataagtaacagcaaccaacagagtcaggaaactcccaccaacaactacaccgatgcccaactcatcgaaatggtacaaaaagatgctttaaagtatttttgggattacgccgaatcgggatcaaaattggcaagagaacgatatcataccgataatccttctcaggatgcaaatattgtgacaaccggtggttcgggttttggactcatgactattttagtgggtattaaaaacggatatatttccagagctgaagcggtttcaagattaacaatttctcttaatttccttcagaatgccaatcgttttcacggagcatggccgcattggattaacggaacaaatggtcaggttgtacctttcagtcagaaagataacggaggagatttggtagaaacttcatttcttgcgcagggacttatctgtgtaagagaatattttaaaaactcttcagatgcttcagaattggcaatttctcaaaaagccgatgcgctatggaaaggaattgaatggaactggtatacacaaaatcccgcagctcccaatatgcttacatggcattggtctcccaattatgattggcagatgaatatgccgttaagaggttttgatgaaacattaattacctatgtgatggctgcggcatctccaaattactcaatcgataaacctgtttatcagcagggatgggtaagaagcggaagtataaaaaatacaggatctcagtttggattacctgttgtagtcaatcataacggcgcaaatggcacggtaggtccgatgttttggtcgcattattcatttttaggattggatccgagaggcttgtctgatgaatatgtaaattatggtgatgctacaaccaatcatgccaaaataatgtatcagtactgcgttgccaatccaaaaggatggcaggggtataattcaaaaagttggggacttacagcaagttattccagaaatccgagtacaggaggagacgattacgctgcgcatcaaccaaataacgatttaggaataatttctcctacagcagcattgtcgagtatgccttacacaccaacagaaagtatgaatatgctaagattcctttataatgaaaattataataaatatgtaggtgtagcgggaccttatgatgcctattctgttcattacaattgggttacaccaagatatcttgcaatagatcagggaacgattgcaccaatggtagaaaattataaaagccagtttttatggcagttatttatgaatgcgcccgatgttaagcagggattaataaaattaggattccattctacacagtatggattttaaacaaaattaaattatgaaaaggataatactttcagtcatcactatatcatcactctcggtttcgtgtaagaactcacagacttccatgcaggaagcatcaaaagttcagattgtaaaaagcaatatcacagacgagcagttaatggataaggtgcaaaaagatgctttaaagtatttttgggattatgcagagcccaattcaatgttgggaagagaacgctatcacgaagataatatctatccggataatgataaacatgttgtgacgacaggaggatcaggatttggattggcaaccattttagtcggcgtagaaagaggatttatcccaagaaaagatgcggtgaaaagattgactaccatgatggattttcttgcaaaagcagatcgtcataaaggagcctggtcacactggatcaatggtgaaactggaaaaacaatgccgtttgggaaaaaagacaatggaggagatctggtagaaaccgcttttttaacttcaggaattttaatggttcgtgaatattttaaaaacggaaacgaagaagaaaaagctttagccaaaaaatgcgatgaactttggaaaggcatccaatggaactggtatacaaaaggtggacagaaagtcctttactggcattggtcacccgattatcagtgggaaatgaacttcccgttggaaggctacaatgaatgtttaattacctatattttagccgcttcgtcacctacttatccgatcgatgccgaaacctattacaaaggctggacaagaaacggaacctacctttcagataaagaaaaatatggtttaccgatgtacgtaaagcacaatggcgcagcagaatacggaggacctttattttgggcacattattcctatatcggtctggatccgacaaatttatccgataaattaatcaaaaactattttgatttaaataaaaatcaggttttaattgattacaaatattgcgttgaaaatcccaaaaactggaaaggatatggacccaattattggggattaacagccagttattcaagaaatgaggacggaagcgcaggatatgatgcacattttccgcaaaacgaccatggggtaattactcctactgcggcattgagcagctttccgtattctccaaaagaatcaatggattttttaagatttatttacacccaaaaacctgaatttattggctcagccggaccttatgatgcaacgtctattcattataataactggacaacgccaagatatctcgcgatcgatcagggaacgatcgctccaatgatagaaaattacagaaccggatttttgtggaaattattcatgaatgcacccgaaattcagcagggattaaagaaattaagcttcaaatcagaaaaataccatattaaataatttttcagaagctgtttcccgctttccgcactcgctattttagggtttcggcggcggcgaagccgccgccgaaaccctaaaatgagctcagacaaatgctgcaatcggggctattaaaaaagaatggttaaattagaatatccaaaacatacaaattctgatatgaaatataaactaaaatacgctttgttgctgccgtttttattttctttaaaagcaaatgctcaggaaataaaagcagagctcaacaaagaagtaaaaagacaggaaaaaatttcttacattctggattttcctcagaatgcaaaaggaaacgttccgcttattgtttttcttcacggttccggagaaagaggcaataatttggaaatcgtaaaagcgcacagtccgtttacctataaaaacttaataaaagaaccggtggcaattttagcacctcaatgtcctgaaaatatgtggtgggataccgttaccgtatataatttgatcaaagaaattcagtcaaaatataaagtggattcttcaagaatttaccttaccggactttcaatgggaggttggggaacactgaaacttgcaatggaacatcccgaaatgtttgcggcggtcgttccggtttgcgcgcctaccgacagagtaatgtacgcaaacatacatcagtacaaaaatctgaatatgaaaatctttcatggcggaatggatgatgttgttttaccggaaaatgcatttaatttttatcaggcactgcatcctgtaaatccctctgccgaattaacgattttctcaaatgacaaccataattcgtgggattcgacctattccaatcctaaattatacgaatggatgctgtcaaaaagaaaagaaaaataatttagtataaatcgttaaacgaaaagtgtttgctgaatgaatagttcatacttttatcttatagaattaccttcgcaaacagaaaataggcaggataattaaaaaaacttttcgacttttcgtttagataaacaaaaaattaaaaatagaactataattaaaagaagatagagttatgaaaaagttaattgtaatcgccactttagcattggctcctgtattttcggcacaggaaatggtaacgaaacccgttcagtcttatcagacggctcaatatcaggctaaaaagaaagcttttgtggataatcttttgtcgaaaatgactttagatgaaaaaatcggacagcttaatttaccaagttcaggcgattttacaaccggtttggctaaaagttcagacatcggaaaaaaaatcgaacagggtttagtcggaggacttttcaatataaaaggagcagataaaatcagagccgttcagaaagtggcagtggaaaacagcaggcttaaaattccattgattttcggaatggacgtcatccacggttacgaaacaactttcccgattccattaggattagccgcttcatgggacatgaatttagttcagcagtcggcaagagttgccgctaaagaagcagcttccgacggaatcaactggacattctcgccaatggtggatatttcccgcgaaccaagatggggaagagtttctgaaggttccggtgaagacccatacttaggaagcgaaattgcaaaaaatatggtctatggttatcagggaaaagaccttgccaatggaaccaatattctggcttgcgttaaacatttcgcactgtacggtgcaggtgaagcaggaagagactataacacagtggatatgagccacgtaagaatgttcaacgaatattttccgccctacaaagctgcggtagatgcaggagtagcttctgtaatggcttctttcaacgaagtggacggagttccggcaacaggaaacagatggctgcaaaccgaagtgttaagaaacaaatggaacttcaaaggtttcgtagtgaccgattatacaggaatcaacgaaatggtagatcacgggatgggaaaccttcaggaagtttctgcattggctttaaaagcaggtgttgatatggatatggtaggtgaaggatttttaacgacgttaaaaaaatctttagcagaaggaaaagtgactcaagctgagatcgatatggcagcaaagagaattcttgaagcgaaatacgacttaggtttattttcagatccatataaattcggagatgcaaaactggctgcaaaagaggtgtacaatatggaaaaccggaacatcgcaagaaatgcagcagcacagtctatggttttgatgaaaaatgacaatcaggtactgcctttgaaaaaatcaggaaccgttgccgtaattggaccattggtaaacaattctctgaacatggcaggaacatggagcgttgcagcaaaacatgagaaagccgttaatctgatgcagggattacaggaaaacttcggtaaagaagtaaaattcctttctgcaaaaggagcaaatattgattatgatgcgaaactggaagatatctatgcagcgcacggtaaaaaaaccgacagagacaaccgttcaaaagaagctttattaaaagaagcggtagatgttgccaataaatccgatgttattgttctggcaatcggagaatctgctgaaatgagcggagaatcgtcttcaagaacagaaattaccattcctcagtctcaggtagatcttttaaatgcactaaaaaagacaggaaagccaattgcagtagttcttttcacaggtcgtcctttagccttaacaaacattaaagatactccggatgcaattcttaatgtctggtttgcaggttccgaatcaggaaatgcaatctctgatgtgctgttcggaaaagtaaatccatcaggaaaattgccgatgactttcccaagaagtttagggcaggttccaatctattacaatgctaaaaatacaggacgcccgttagatcagaagctggttgataaatgtgaataccagagattccgttccaattatatggatgaatgtaacacgccgttgtatcctttcggttatgggttaagttacacaaaattcaattattctgatgttacagtttccaatgctaatccaaaaggaaataagaccattcaggcatctgttactgtaacgaataccggaaattatgatggagcagaggtcgttcagctttatatcagagatatggtaggaagcattacaagacccgtaaaagaactgaaaggcttccagaaagtaattttgaaaaaaggggaatctaaaaaagttaccttcgatattactcaggaaaacctgaaattctacaacggagatctgaaatacgactgggaaccgggtgaatttgatatcatgatcggaaccaactcatccgatgtgaaacattccaaaatcaactggacaaaataattttataagccgctcacaatgagtggctttttttgtatttttgaataaacaataactcatcaatgctttggcataattttttagataattgaaaacttaaaatttttaaaaatgagaaaaataattttattcagtacaatgttccttggttcattagtctttgcacagcaaacgcatatcgtgggcggagataaagatgttcatggctgcaaagcttccgcaggttatacttattctcagatcaaaaatgattgcgtaagagtttttgaacagaaaatcaaattaaaagaagtgagttcagataaaagctacactacttcaacggctgtaattttcaataaaagcatgaaaaaagccgaaatttttattccggacgaaagcgcaaacagcattattctcgacagacagggaaaaagcaaactctggaaaagcggaaaacatatcaaagacagctacgttttagttccttataaaaaaacaggttatcagattaaaaaaaatgatgttatcatttatcaataaatgaaagagtcattcgaaagagtgactttttgttttttttgatacaatattttacataaaataatctgaagagcattacattagctaccaaccattaatcataatcttttttagagctatttcccgctttccattacaatcttttttttcaaaaaaggattttcattgcaatcggggctattgtatttaaggtgatttgtaaaaattgttcataaatctcaatttaaccccgttaaaaagaagtttttggattgaaattatttaaaaatcgtaaatcagcagcatgaatttttctctctcattgaaaaaccgtatttttgcatatctaaaaaaagtaaaagaaaagaatgaattcctacaaaaatccattggaagaacgctattcaagcgaagaaatgttgtttaacttttctcataacaataaattccagaactggagaaagctttggattgcccttgctgaaatcgaaaaagatcttggtcttgacattacagacgagcaaatcgccgaattgaaagccaatgcagaaaacatcaattacgataaagcagcggagtacgagaaaaagttcagacacgatgtaatggctcacgttcatacatatggtgatgtagcaccttcagcaaaaggaattattcatttgggggcaacttcagcatttgtaggagataatacagatttaattcagatccgtgacggacttttaatcttaaagaaaaagttggttaacgttattaaaaacttagcggattttgcaattcaatataaagatttaccaaccttaggatttacacatttccaaccagctcagttaacaacggttggaaaaagagcaaccctttggcttcagagtttagtccttgacatcgaagagcttgattttttcttagaaactttacgtttcagaggggtaaaaggaacaacaggaacggctgcaagtttcctggaacttttcaacggagattattctaaagtgaagcatttagataaagaattgtcaaaaagattcggttttgagaaagtttttggcgtttccggacagacttacgacagaaaaatagatgctaaagtagtcgctttattaggaaatattgctcaatcggctcataaattcactaacgatttacgtttgcttcaaaatctgaaagaaattgaagaaccattcgagaaaaaccagatcggttcatctgcaatggcttacaaacgtaatccaatgagaagcgaaagaatcggggcattggcaaaatatgtgatgtctttgacaacgagttctgcgatggtcgcctctacacaatggtttgaaagaacattggacgattctgccaacaaaagattaactattcctcaggcttttttagcagttgatgcgattctgttaatttggaacaacatcatgaacggaattgtggtgtatccaaacagaatcaacaaacatattatggaagaacttcctttcatggcgacggaatacatcatcatggaagaagtgaaagctggaggcgaccgtcaggaaatccacgaagtgataagagttcattctatggaagcttccaagcaggtaaaagtggaaggtaaagaaaacgaccttatcgaaagaatcctgaacgacgattcattaaaactggataaatcaaaattaaaagaagttcttgatcctaaaaacttcatcggttttgcaccaattcaaacggaagaatttattgccaatgaagttcagccgattattgatgccaacaaagatttgataggattagaagctgatcttaaagtataaatcaatatgcagtctttttgggctgcatattttattaataattgtatgaagattagtatcttttttgttttgctcttattacctgtgatgatattttcgcaggaattaaaactgaataaaaaaattaaatcaaatacagattttgaacatcctatttccggaatttctgcaccaatgaatttgggtaatttttcaagaatagctttatttgcaaactctaaaaatgatagtgtcttttctgcagaatataaaaatgaaaataatgatgctctttttcagttcaaaatagttttaggaggtttagatgaagagaggctttttaattattatttcgaaaatcttaaaagcagaagatacagtcctaaagaggctatcaataaaacaataagttttaatgacggcaattttaaactcaatggaattagcacttatttttcgcatcttgacagattaataaatgtaagggtttatgatgcaggattttggatctttgtttcagaaacaagtcagaaaggaaatgatactttggctctggataacagacaagatgagtttttgaaaaaaataatgccatcaaaaattgttgaaaaaaatcctttgacgagatattcaaatatttattacgcaaaagcctgttttcgtgattctttaatgcttagaagtgctatgagtagtgcaactaataagatgaggtggatctatgaaaatatcaataaatatgaaaaagcatcaggaattccgggtatacttttaaactatcagattgctggtattaatggttttattgactataaaacggaaaaaaatccgaaaccaagcaaaggaggttacgaaacaaataatctaattggcttctttataaaactaagagaatccggctttatagatgaatttttgatggagagttactattatttattagttcctcctgaaaatcatcaatttgattacaaaggctaccaaaagtggaaacaggaaaattcaatcgaatataatacttctcaaaagtattatattattgtaaattcccgcaagaaaactgatcttaacaaagatgagtaaattaactaataagtctaataatatttaaatatctgacatctaatgtctcaaaacaaaagaattttcgtagaaaaaagaggaattttcgatgtagaaagtccaaaaatttttgatgaagtaaaagcggttgttccgtcgatccaaagtgtaaaagtatacaacgtgtacgatattttcggattaaatgacggcgaattcgaaaaggtagttaacagcaccttcgtagatcctgttacggatattttaatcgaagaaaatcctgcacagggaatttatttcgcattggaatttttgccggggcaatatgatcagcgtgcagattctgcgcaacaatgtattgctttgctgactggaaatgaaaaatctaaagtaagaagcggaaagctgatcgaattcgaaggtatttccgaatctgatttggtgaaaatcaaagaccttttgattaataaagtggaatctcaggaaaaagatttatcgactttaaatattcctgcggaagaatccccttcaaaagttattgttcatgaagggtttatcaattttgatgatgctcagcttgaggaattctttaataatcacggttttgctttaggtttagacgatttaaaattcattcaggaatattttaaaacagaacagagaaatcctacagaaacggaacttaaagttttagacacctattggagtgaccactgtcgtcatacaacatttgaaaccgaactgtcaaatatcgaattcgaaggacagtttaaacatacattggaaaccattttcaatgattacatcgaaaaaagaaaattcttaggacgcgaattgaagcctatttccttaatggatctggcaactgtttgcggaagatatttccataaaacaggcaatttggaaaaccttgtggtttctgacgagatcaacgcctgtacaatccaaatcgaagcggaatacgatggtaaaaaagaaccgtggtatttattattcaaaaacgaaacccacaatcacccgacagaaatagaaccttttggcggtgcttcaacttgcttaggtggtgcgatcagagatcctttgtctgggcgttcttttgttttccaagcgatgagattaacgggagcagcggatgttttggaaccggttgataaaacattaccgggaaaattgcctcaaaaaacaatcacgaaacaggcggcaaacggatattcctcttacgggaaccaaatcggtttggcaactacaatggtttctgaaatctacgatgaaggctacaaagcaaaaagaatggaagttggtttcgttgccggagcagttcctgtagactgggtaagacgtgaaaaacctgaagctggtgattcaatcattattttaggaggagcaacaggtcgtgacggagttggaggtgcaagcggaagttcgaaagaacaggacgaaacttcaatccacaccatgagttctgaagttcagaaaggaaatgctgttgaagaacgtaaaattcagagattgttcagaaaccctgaagtaacgagactgattaaaaaatccaatgactttggagcgggaggagtttccgtggcaattggcgaaatcgcagattctctagaagttaatttagatgttttacctctaaaatatgaagggttgaacggaaccgagcttgctatttccgaatctcaggaaagaatggcggttgtggttgaaccaaaagataaagaacagttcatcaaattctgtgaagctgaaaacattgttgctgttgaggtggcaaaagtaacagattcaggaagaatgcagatgttttggaaaggcgataaaattgtggatctttcaagagaatttctggatacgaacggttgttcaaaaagtcaggaagttaaaattacccacctgaatgaagtaaaagaagaaacacctgcatttaatgaagagaatttcctaaagattttaagcgacaaaaatgtggcttctcaaaaaggattgctggaaatgttcgattcatcgattggtgcgactacggttgcgatgcctttgggtggaaaatatcagcagactttaatggaaggaagtgttcagacattgccgatcattggagcaaaagatattgaaaccgtttctctggcgagttggggattcgatgcagaaatttcaaagcaaaactcacttttaggagcttcttatgctgttgtagaaagtgtggcgaaaatcgttgcaatggggggcgattataaaaatatcagattcagttttcaggaatattttgagaaattaggtcagaatcctgaaaagtggggaaaacctttggcttcacttttgggagcttacgatgcgcaaattaatttcggtttagcagctatcggagggaaagattcaatgagcggaacgtatcaggatctgaatgtgccgccaacattgatttctttcgcctgtgcaaacggagaaaagaaaaatattatctctcctgaatttaaaactgaaggaaataaactatatttcttcaatcatatcgctcaggaaaacggacttccgaattatgatgctttaaaagatgtttatgaatttatattcgaaaatatcaaagcaggaaaaatcgtttcggtaaaaacagtgaaagaaggcggagttgccgttgccttagcaaagatgagtttcggaaacagattaggcgcagacattacagtagatgatgcttcggcattgctcggcaagcgaattggtagcttaattattgaatctaaagaagagttaagttctgtaaatcttcaattcattggaaaagtggttgcgaatgaagttttaaccatcaacaatattcaaacttccatcctccagcttctcgcttccaacagcaacaccttcgaaaaccttttcccgacagttgaaaaagaaaaaataacggttgaaatcgatgaaaaattaaattcagtcaatccaagaaatatcatcattaaaaaacacgggattgctcaaccaaaagtattcgcgccggtttttccgggaacaaactgcgaatacgatacactgaatgctttcgcaaaagaaggcgctgtaatcagcagtttacctttaatcaacatcaatcaccaattattggatgaaagcattgatgcttgggttgaagaaatcaaaacttctcagattctggctttctcaggagggttctcagcgggtgacgaaccagatggttctgcaaaattcattgtcaatgtgttgaaaaacgagaagatgagaaatgccgttcacgaattgctcgacagagacggaatgattatcgggatctgtaacggtttccaggcgttggttaaatccggattattgccttacggaagaatcaaagatttggatgaaaattcaccgacgttggctcacaacgcaatcagaagacatatttcccaaatggtaaacgtaaaagtcataaatgacgaatcgccttggttaaaaggaatgaaagatcaggtatttaccattccgatttctcacggtgaaggtcgtttcatggcttcggaagcggaaattcaggagctatataaaaacggacagattgcgacacaatatttggatttagaaggaaatattgcccacggaatgcctttcaatcctaataattctttattcggaattgaggggatcacaagtccttgtggaaaaattttcggaagaatgggacatccggaacgttttgcagaaggtctgtttaaaaatattccaaccgcaaattatcacaacatctttaaaaatggagtggagtacttcaagtaaaagatcattaataaataataaaatgccttcgttacataacggaggcatttttctttttacagtaatttttcctgatttacggaaaaccgtaaagaaaatgctgaaaaccgtaataaattgccgctgtaaataaagatttaaacaaaaattttaactatgaaaacaaaaattactgcaaccgatttatttctcggtattttagctgtaatgcttatcggtgttagtttttaccagacctggctcggtttacagcagatttttggagggagctcctttgttattgctttggtgctttctcttatcctgctttttttactttggcagataagaagggcaaaaaccagcggacagtctccgtcttcactaagctggatctattttttctttgcttcattttgtttcgttgccaatttcaatgcattgtatacaaggtttatgaggaccgatatttatacgacagaactgcgtaatgttaacgaaaaattcagcgcgctggaaacagatgtagaatctaagctgaattactccgtccccgatgctaagacaagacaggcgatccgaagtgaattaaatcttctgaaaattcagatcagtgatcctaaaaatgtcgggatcggaccggaagcaaggcagattattgcaagaattgaaaaaatgatcggcaaaaaagtaacgcctcttacacctgtaagtgaaactcctgacggatatgcagatcttgccgacagaatggaagaacagatcgtacagatggtttataaccttactccggaagaaaaaaatctgatgagtgatattaataatgcttccgtaagatggaataaagaaattcagaatcttttacagatgaatcctgatgtaataaacctaatggctcagggacagattgataaatctttaacagagtataacagactcggatcaaaagcagaatctattttgggaaaagataaactgaaatttgagcctacccattctgaaacgcaggaagtaggaaaaataggatatgctttcagccatgccatcaagaatttcgggatgtttcagttggttgttttagcaggatgtatattactggatttcggtattatgtttatcattcttttaatgccaacagaaactaacagaaatgcaggaaacagcagcgaaagtatctttaccagcaaacgcagcggaaaaacaataatctaatacaaggtataaaatatggaatgggaaaatgaacctttgaaaccattgtcttttgatgaagatcaggaggaagttcttaaacctttgaattttgatgaagaagacgcgctgaagcctttgtctttagaccataacaaagaagctgtgaacgatcgttttgttcctattgcaaaaggcaatgtctcggaaattaaaaataaagacagcaatttcgtgttttttttcggaactgcttcttccggaaaatctgttattttggcaaccatgctttattatctcagatcgaaagcaggggttataagacccaaaatagggacaccaaataccgctgaagcagaaagccttctgtatgatttttttgaaaacatcagtaaagggattttacctgcaggaacagtaaaagatcaggtaacgagactggatcttgttttcgaacctaacaataaatctaagaaaataaatcccattaaccttacttttttagaaacttcaggagaaaatcacaacgaaataaaaaggggagggagctatcacagcagcatagaaacctatctttctgccaatcttcctcttacatttataattgtaacaagctatgaaagcgcgcataaagatgatattttaatcaacacttttttaaataagcttgaaaagtatgagaaaaaattaaaatccgtcaatattattctggtcatctcaaaatgggataaatccggaagagccaatgtggaagcctcggcggagctagatgattttattcaggaaaggcttccgatgacttctactgcaatggatacctatggtctggcaaaaacattctacaccgtgggagagcttaatgaagaaaccaatcagataaccattctgaatttagacagagcgcagaaattatcagagtggctgtatgaaagtatcgtgggttatccgctgtcttatgaaggaactttttgggaacgtataaaatttagtcttacaaattaatgagcagtgttaatttaattgcattcggaacttttggaaatcccaatggctttacccagactttttttgcaggaacacccgtagaaataaagactttagacataagaggagctgtacttatttatccgaacagtaaactgtattctctacggaaagaatataaagatggttcttatataataacctacaccatttatacttatgccaaagaacctacttcggcgcgggaaggatcttttatcggctccagtattatgtttactgacgaaattgcagaagaaaatattaccgtccgctgtcttaacgaattccactccaatcttatcagcagaaacgttcagaacgatacacttacggtaaatcactcagaaaatttctcaattggtaagcctgcagattttgataaaataaattttaatctgaaaaaaatagatatcttcgattccgtacagagtacaaaccgccaactgatggtatattgtgaaaccaatccttccgcattacagatcattctgaaaaaagcagttgatctgctgaatgtatatgacacaatttacttcacagaaagttcggacattgcaaaatttgttcaccagaaaaatatttttcagtttgttcagaaagatgggtttgaaaatgaaatcaaaaaactgaatgacgaaagaaaacgtaaaatacaggaaaccgttacggaatttgaaaatgaaaaaataaaatgggaaaattccagaaaacagagtggtgaagattttaaatctaaaattgaaagaaacaaagaactgcatcttgctaacggcagaaagatagaagaatctgagaaaaatttagagaaattaaacgaagtttattacgcattctctcagaaaattgatgaatttctgaaccaattgaaaacggccgacagtcttatgttgaataatataacgcagtcttacaaggcagataaaaatacttttttagaaaacatcagaaacttaggaataccggaactggattctgtttcgcagccaagatcagttcgggaacgtgaaattcccgtgtattcatcttcttattacagcaactctggcagaaaagaagcggaaacagagcagtccaatatttttaaaatagcaacaattattctttctgtttttttgctcgctgcagtttcaggtttagcatggtttcagttttttaaagagcctgaaaaacaaattgtttataaagaaccggagccagaagtaacaacagagccggtttctgagcttacagtctctgcactgaatccaaaacctaattcggaagcagaatttctgatcctcaatgaaatgaacagaaagctgacgacagacttaaaaattgattctgttacaggttttgtatttaaggcgaatccgcagagcgtagaaaaatattataaatatcaaaagaaagactattccaaacagcttttcgaaaacaataaggaaagttttaaaatttcagggacagatacaatatatacaggcgatttaaaattcatacccatctttaaataattaattttttgtaattttaaaaaggatagcttatttaaaaggaagcagaattttgatattgaatacatgagcaaacaaaatcataaaaacaaaatgactgtcatcaatggcagtcatttttcaaatctggatgcattctatgaagaagtttcattactttttttgaaagatgaaaattggaaagtcggaactttagatggttttgatgatattttgtatggatacgaaggtgaaattatctggaaagatgcccgaaaatcaaaagaagatttaggttttgatctcacgaaagaattttacgaaaataaaatccgacagggaaaacccttcaatgttacattgattcagcaaaaactggatgatttaatcaatggaaacggacaaacgctatttgaaattttaatagaaattatagaatcgcataaaaatattaccctaattttggattaatttttaattgaacaattaacatttgtctaaactatgtacggattattttttggagacagcatcacttatggagaatacgatggtgtttttggcggctgggtcgacattctgaaaagatatgctctgcaaaaatacaatgaaggaaacaaagaactcattattttcaaccttggaatcggcggcgaaacaacagaaggtttgataaaaagaatttctcacgaaatgacggcaagaaattcagatgaaggaaatattatttttctgggatacggtgcaaatgatcttgcaaaaaaagacgatattcatcttgtaaatcctgaaaatttcagagtaaatatattacaggcggttcaggaagcggaaaaatattcaccaataatttacttaataagtgttcttccgattgctgaaaaattagacggaattatcactgcctccggaaaattaagaacaaatgatgaggttttggtatacaatcagattctaaaacaaattgccaaagaaaattctctgaattatatagattttcattctgcttttctgcaggataaagaaatcctgctttcagaagacggcattcatcccaacgaaaaaggttatggaatcatggcagaaattgccattccgattatagaaaaatatttataaacaaccttcagaactgctgaagaaatcctgaaacatatttccagtaaaccataactccgacgataactgataaaatagccatcaaaactacggctccggcggaaatatctttgatgaaaccaattcttttatcaaaatcagggtgaataaaatcgcagattttctcaatggcagtattcagaatttcagtcgctaaaacgccgaaggaaaccattaaaattaaaatagtatctgtagaagaaagattcaggtaaaaaatcagaaacaaattaacaaggaaagcggcaaattcaagctgaaaatttctttcatgcttcatcatgagaaaaacaccccggaaagcatttcttaaactcttatgtacaggaggttttcgcatattgaaactttatttgcaaatatagtcaattgctaaaagaaaatccttatctttagtgctttaggatgttttcgggcatcaaaaagcagagtagggaagttgtaaaattattttgatggatgttaataactctcagaattattcttttcattctgttttctatttattatatttgtaaaaatttatttttaaatctatgaaatttattatttcaagtggtgaactacagaaggctttgcaaactgtaagtggcgtaatatcaagctctcagtcgagaccgattttagaaaactatctttttgaattagacggaactcaggttaccattaccgcatctgacggcgaaacgactcttgtaacttctcttgaggcaaagtctgatgatacgggtaaatttgccgttcctgcaaagatttttcaggacttcatcaagacttacggagaacagcctcttacgttggttgtgaaggataatgcagaaggaacaggaagtcagcttgagattttagatgaaaaagataacttcgccgtagcattggataacgcagacgattatccggaattaccggaatttgatgccgcacaaagtgttaccatgcctgcaggagttttatctgaagcccttaccaatacgcttttcgcaacaagtaacgattctcttcgtccggtaatgacgggagtactgttccagtttggagaaaatgaaaccaacttcgtttctacagattctcacagactggtagtatacaaaagaaaagatctgatgaattccgaaccgatggaattcatcatgcctaaaaagcctttaaacattttcaaaaatattttagcaagttccaatgaagacgtaacgatcgaattcaacgagaatatggcaaaattcacttttggaaaacacgtttggatctgtagattaatcgacggaaaatatcctaattatacagcggtaattccaaaagagaacccgaatgtattaaccatcaacagaaatcttttattaggagcgattaaaagagcttccatcatgtctaataaatccaccaatcaggtaagatttaagctttctgcaaacattcttcaccttcacgcagaagatacggagtatgcaaacaaagcagatatgcagattccttgcgattacaacggagaagatatcaatatcggcttcagctctaaattcttaacggaaatgttaacgattcttggttcagacgatatcaccatgaaaatgtctcagccaaacagaccgggaattatcgaacctcttgatggtcttgaagaaaacgaaagtattttaatgttatcaatgccggtcatcggattgtaattttaacgtaaataaaataggataagaggttttgattttttcagaacctcttattttttaggagctatttcccgctttccgcactcgctatttacttaggaatcggctgcggcagcgaagctgccgcagccgattcctaagtaaatagcgagtgcggaaagcggggctagaattgcagtccgccgttttgcaatgaacaaagagaagaagtaatctccggaatacatctacaagtagaaatcgaggcttagttttagaaacagtaataacagatttaaattctgctgtcacttgctgagtagaacgccttagcgaacaaaaatattcgaaatttaacaattcttttcttagcgatcttttgcgttaaaaagaaggttttttagactgccccgtcgcttcgctcttcgtaatgacaatgccttgctgctccggcaggaaaaagaaagctgctaaataactcttaaagtttctctcacatttctctgtttcttaaaaaaacacgatatttgtaacgcgaaaaattcaagtaaaattttcaaaataagcaaggtttcttttaaccttgaaaaataataaattatcagatgaaaatatcaaacaactggcttaaagattatatcaaaacggacctgaaaactgaaagaatcggtgagttccttacagatataggacttgaagttgaagggatagaaaaatttgaaagcataaaaggaagcctggaaggaattgttgtaggtaaagttttaacctgcgagaaacatccgaatgcagacaaattaaaaaagacaaccgtagaagtaggaaacggaaagattttaaacatcgtttgcggagctcccaatgtggaagccggacaaaccgttcccgtagcagttgtcggaacaaaaatctatgataaaaccggaaactttttcgagatcaaagaagcaaaaatccggggagaggtttctcagggaatgatctgtgcagaagacgaattgggtcttagcgacgatcacggcggaattatggttttggatgaagaaaagtttgaagtcggaaaaaatttcgcagattactttgaaataacaaacgatgaagttctggaaatcggtttaacgccgaacagaaccgacgcgatgtctcattacggtgttgcaagagatcttcatgcttatctttccacaaacaaacagaaatctgagttcgaaaaagtatcttccgttgccctgaacaacgaaggttctcacgattttacattagaagtggaagatgcagaattatgcccgagatatatcggagcggtgattgaaaatgtaaaagtggcagattctccggcttggctgaaagacagactgaaagccatcggattaagcccgatcaacaatgttgtagatattaccaactatatccttcacggttacggacagccgcttcatgcttttgatgcagataaaattgcagataaaaaagtaaaagtagggacagtaaaagaaggaacaaaattcacgactttagacggtgttgaaagaactttgaacggttctgaaatcatcattaaagacggaaaagatacgccgatgtgcattgccggagttttcggaggtgccaattcaggggtttctgctgaaacaactaccatctttttggaaagtgcttatttcaatccggttgcggtgagaaaaggggcaaaattccacggattgaataccgatgcttctttcagattcgagagaggtgtggatcctaatattacaagaacagctattacgcacgctattaaattaattcaggaacttactgaaggaaaactggtgggagaattgctggaacagtatcctaagaaaattgaagatcagtatgtcatcatcagattttcaaaaatcgagcagattttaggaacgaaaattcacagagaaaaagtaaaggaaattttaaaagcccttgaaattcaggttttaaatgaaattcagaacgggtatgaaatttctgttcctgcgtacagagcagatgttaccagagaaattgatgttatcgaggagattttaagaatctacggatacaataagatcgatgctcctcagaaaatttcctttacgccggtaaaactggctgcacaggatcaggatgagcttgaaaataactgggcaagaacgttacagggattaggtttcaatgaagtaatgaacaattcattgacttctttaaaagatgaaacggatgctgtaaaattattaaatcctttaagcaatgatttggcatttatgagaaagtctttactggaagggcttttgcagaatgcaatttacaatatcaacagaaaaaatcaggatataaaattcttcgaattcgggaaaatctatcataagagagatcaatacgaggaaagaaagcaattggctatccttgtttccggaagagacgttgcagaaaactggttacagccgaaatctgcgacaagcttctataacctgaaagcttatgtaaaagttttgctggaaagattagcagttgattataaagaagtagctttgtctgatgaacgattttctgatgctttagcgtatgaagtggacggaaaagctttggtaaaaatcgggaaagtggctcctcagatgctgaaagatttcgatattgagcaggaatgtttctacgctgaaatcgaacttgaatttgcccagaaattacgttctgaaaatcaattgaaattcaaagatattcctaaattcaataaaatcagaagagatcttgctttactgatcgataagaacgtgaattacgaagatctttatcagacagcaaagaaaaataaatctccgtacctgaaaaatattaatttatttgacgtttacgaaggtaaaaatcttccggaaggcaagaaatcttatgcaatgagcttcgaacttttaaacgaagagaaaacattggaagaaaaagaaattactgcggtaatggattcattaatcaaatctttccagaaagaattcaatgcagaattaagaggttaaaaaaattacctttcgaatacaatataaacggacatttgtccgttttttttatgggtaaaattaaaattgacagcaatttaaagattgaatgttttattaaattaacctcagttcgggataagaaaaattttaaataattgatttatagtgttgtattattttatcgcaaagaaaaacaaaagattttttttacttattgaaagtttgtaaggtaaacaaagacacttcgtttatttaaaaaagacaaaatggtattactttgataagttttacgcctttgtatatcttaaaagctgaattgctgataattgaatctctttgtttaaccttgcgtttaatacttatcccgaacttaggttaaattcagataaatcatattcaattacaattttatctgaagtgttaaagaataataaaatcttccgaaacccgtttaaataataatatttccgtaaatttggtttaaatcaaaaagtaaacaatgaagaatctttttttaagtatatgtactgctgcagttttggtttcatgtggaacaatgtcgagctcttctgcttccaaagtaggaaaagcacagccttctcttgcgggtacaaaatgggctttggcagataatgtgaaagggaaaattcctaccctgaatattgaaggagaaaaaatcagcggtaatgcgggatgcaacaattacttcggaacggcaaaagtagatccttctatgggaaatttttctgcgggagctttaggttctacaagaatggcttgcgataacatgagcgtagaaaaaaactttatggatatggtaggaaaagccaataaatatgtagtaaccggaaatgttctggaattgtatcaggacaatcttttacttttgaaattcaataaagctgaataaaataaaaaggaactcaatcgagttccttttttatgtttaaattgttattaatcttcctcttcttcgtcgtacttagccaactcttcatcacaccatttaaacgcagcttctacaacttttgtagcctcgtctgccattgtttcttcgtcgtcaccttccaaatcatccagccactcaacttcttcttcctcaacgtttaagataaatcttggatattctgtatgaaccacgaataaatcttctggaaattccgaattatctgctaataaaaactttggtaatttcatttttttaatgttttaactttaaatcaaagataataaaattattggtatttgttcttgtcaatctttattttttgtaaaactttataccttgttaacgttgttttctgaagcgtatctttcggtttgaaagttaacgtaatattcgggttaatggtactcatcagttcggcaacctgtattttgtcaagatcttctgccgtttcaagataaaacttcagcggaatcttctccattttttcagattgcagaaactgtctcatttcctttctgttttcaagataatttcctttggaaagccatgtaaataacattccggaaagcagacttaaaaagcctaaaacgtacgttttaacttcaaaaaccatgaataatttcctgaaataaaccagccagaccggaagactgaaaggagccattaatctgtaatcgatcgcattcacagaataaaaatactgaataaaatacgagcagatcatcccgaaaacactcacaaaaatataaaacgcctcggtttctgaaagtttatatttaataaacaaaaatacaatcagaagaatatttaaaaagccgattccgtagatcgcataattgatcattccgcctcccggatctgcaatgtgaatgaatgggttgaaagtggtacacaatccctgaaacaattcagcaagaagtttagaggtaggatgcagaccgatttccagaaactgactgacatagttttcgttaaagtaatcgataaaaagaaatttatacaaaaccacaaaaaatcctccgatgagtcctgaaataataaatattcccgaatattttcttttccagaaaatcaatccgaaaagcccggttccgcccataatgaaaagagcgctgtatcttatgttatacaaagcaatcaggcttagtgaaagataaaaaatggcttttctcttttctaattttccatcaataattaatgtggaaacatataaaaataaaataacgaacggcaaaatcagcggttcgctcatagtgtaggagaaaattgacaaaaagctgaataaagcacataaaacaacggattctctaaagaaaaatttcttcttccaggtgaaaaaaagaatgaagaaaaatgcggaaattcctacaattttacttccccagaattcatcaaacccgaaaaatgtaaaaaattttatcgctaaaggatatcctaaaggagtcgtggtattgtcgatcgtcgggaaaacgtgcgcaaatctcatataacggatggaatcaggatttacacgccctttttcattaagcagaaaacgcaaaatggtcatcactaaagtaatgatgaccattgatatctgaatatttttttctttaaattttatcaaggttgcagttattaggttatagattgcagatttagagtctaaatttataacttataagtcacaacttaaaaattatttagaaaacattttcgctactttttccgcttttttgctttcggagtaatcatagaaaccttcgcctgattttacgcctaatttccctgccattaccatgtttaccaacaatggattcggagcatatttaggatttttgaagccgtcgtacattacgtttaagatcgctaaacaaacatcaagaccaataaaatcagcaagctgaagcggccccatcggatgcgccattcccagtttcattaccgtatcgatttcctcaacacctgcaactccgttgtacaatgtctcgatagattcattaatcataggcattaaaattctgttggcaacaaatcccggataatcgtttacttctacaggaacttttccaagcgttttgctcatttcatagatcgcatcaaacgtttctttggaagtggagtagcctttaatgatttcaaccagtttcatgatcggaaccggattcataaagtgcattccgattactttatctgctcttttggtagccgcagcaattttagtgatcgaaatagacgaagtattggttgccaaaatacagttttcaggagcaaattcatccatctgtccgaaaattttcagttttaattcctgattttcagtagccgcttccacaataagatcagcagaacctaccgcatcctgaagtgctgtaaatgtcgtaatgttccctaaagtttctgctttttgttcttcggtaaggtttccctttgcaattattctgtcgagattggtggtaatggttttaagacctctgtctaaagcttcctgagatacatctacaagatttactttaaaaccgctttgtgcaaatgtgtgcgcaataccatttcccatggttccggctccgataactacaatgtttttgatcatttttccttatttaagttttaattatttgctgttgattaaagttaaatttcgtgcattggaaagatctgccttttttaccgtcgttgtttcatcaaaactcacattaccgtctctgttcggtcttttcatctgattctgagtattgatggcagctttcagtccttccacaaatttggttttctgggttctggagaacgtatctgttccgatgtaaatgttaaattcaccttctcttcccaaaccgctttgtttgtacacttcgaaattttttattttgttttttttctgaaactgattaataaaattcatcacaggtttatccgatggtgttccgcagcaaatactgtgatagcctacctgcagataattttcgcttttctgtgcgaaaaatactgttgaactgaataacccgatgattaatactatttttttcatttttaatggttttaaaattaagcttaaatttttacttattaaaataatcccagactgtttttgaaatgtctgaaatcattctacagttcacttcggctgtttccgttgagttactgacaaatacagctattgcataatgcttgccattcggtaaagttacaattgcaatttcattttcagcacccgttaaacctgcattattcttcccggaagatcccgtttttctggctacaggtgtatctttcggaagctgctcaattaatttatttgttcctgtggaagtggagagcattactttcatcagataatcggtcgatttttttgataataattttccgtcataaaactttttcagcacatcaaccgcggaattcatggtggtgtaattttcatactgcgcattccagtctttatgcatcgcttcttcattgtatttgatctgaaagtttttcacccctttagcattcataaatttctgaacaacctgtgttccgcctaataattttaaaagaatatcgcagccgttattgtcacttttagcaacggtgtattcgataatttcgcttaaagaaacaatagcgccatttggatatttttcgcgaagaggcgaccatgtgttttcatgtaaattcgactgcttaagggtaactttttgatctaaagaaagttttcctttctctgcataatctaaaacagcagcagcaatatgaaacttaaaaacactctgcatcggaagttttttgtcagcatttttgttgtaggtaaagccgttttcgaatcccagaacagaaattccgaccgttgctttcttatttttaataatggagttgatttgcgtttctaaagaggatttctgggcaaaaacaactgccgaaatcaaaagaaataataaggtgatttttttcataatatttgtttaatcatatttttattaaccgcaaaagaagcaaaagaaattctgtactatttaaatactttttagttgatcaaaagtctgtaaaagataaaaatctttgatttttaaacttatgtgttcttttttttatttaagtattgaacttaaaataactaaagtgttaaaaatttccttcttttgcggttaaaataaaagtttaaatagttttaaaaataaatccctcttaaaactaaaagggatttgcaatttatgattttttctttatctcacttcaaaataattcagattaaccccatcattttcgaaataaattctgattttattttctccttttttaagatgaattccttttgcagaagccgttttccaaatttcatttccgcctgttaaagctaaggaaacgatggttaatagttttcctgaagcatcttcaatccgtattttcgcatcgttttcacttgcatattttatgtcgaaagtatacgttttatctgcttttgagttgatggtatactgaagccattctccggtttctgtctttccgacgtaatattcattgtcttttgttctgtaaatatcaacgccgtcatttctcagttgatttcctgaattccattccgatctttttgtgggatcacttacccaaagattaatgaaatctttatccgaataagcagaacccattcttcccaaatcataatcggttgcaaagatttttccgggagcctgaagattcttgaaaggttttgtggaaccgtcttttgtctgcctgaacatcgcatcaatcacatcatttttaacttccacattgctgaatttgtagttttcggcgatttgcatcaaagctttcttggcgaattctttagatggtttttcacctccgttcttccagtaatccaataatttctgatattccggagtaatttttacgttggtaattcctgcgatattgtctatctttttcatcggccagaatgcgtaaccgatgttgtgtttatccaaaagctgaataagctctgtaaaccatacatttgaattttcgcctgtttcgcccagccagatggggattttgtgtttctctcttaaatccaaggcaaatttcagcgtagcatcatcattattattccagtatttatgaaaactgaagaccatattatcgtcccaaagcggcgttaaaccgttgtaattatttccccatccgtttccttcgataatgatgatgtgttttttatcaacagtacggatcgcttccgtgatttctttctgaagcttccaaagcggagcatttgacatttcatccgttccgtttatattttttcctgtaaaattgatattcggttcgttaatcagatcataaccgccaatccatggagaatctttgtatctttcggctaatttcttccataatgcgatggtttttttctgattttcttcactttcccaaagagaaggtttcgatttgtcgttatcagaaatattcacatcatttccctgtccgcccggtgctgcgtgaagatcgagaatcaggtacattttattatcagcacaccatttcagaagatcatcagtcattttaaaaccttcttcaagccatgtattttctccttttttagattctttttcaatcggtagagtgtacaggttataatgcattggaagtctgattgaattaaatcctgcttttttcagaaaatcaatgtcctgtctggtaattccgtttttcagataagccttgtaaaactcattcattccgtcttcaccgatcagttcagcaattttctccttgattttgtattgcggacctgcaaagtcagccgttttcagcatatatccttcctgaagcatccagcctcccaagccgagacctcgcaactgaatattttcacctttatcattaataattttttcaccttgtgtttttaaaagttgtgatgtcccaaattgagacaataaaaaagcggataataggatggctcttttcatagtgattttaattattgaattgttaagggattgttataaagaaattattgttgaataatggcaaatatatttaaaatatgttgaataatattaaaaacagaaattgaattgaaaaaaataatgatgattacgaatattgtgtggtgcaaatcgggatcgggaagaatgagaaaattagtactgtttcgatgaaatggaaataggctgtttaagtttggttaaagccaattgagcataaaaaaaaaacgggtttttagcccgtttctatcaataaattatcgtgttattcgtgaaaatatttgtgcggtttgtgttaaaaaattaagaaatcaacttcataatctccaaagccactttcagcgcttctgttccgtcctcaatagaaacttctacgtgtttgtcttccgtaatggagtctgcaaaagaattaagctcatccaaaatagcattattcggctgaatattcggatattcaaataaaatctgatttttctctccctctgcgttttcaataatcatatcgaatggagtagggttttcaggagcatctttcatgcggatcacttccgcttttttctcaagaaaatcaacggaaatataagcgtctttctggaagaaacggctctttctcatcgctttcatcgaaattctggaagtcgttaaattggcaacgcatccgttttcaaattcaattctcgcattcgcaatatccggtgttttgcttaccacacaaacgccgcttgcatgaatgtttttaacttttgattttgcaatgcttaataaaatatccagatcatgaatcatcagatccagaaccacagaaacatctgttccgcgcggattgaattctgctaaccggtgaatctcgataaacataggatcctgaatgtaatctttagcaccgataaatgccggattatatctttcaacatgaccaacctgagctttaatgcccttttccttacatttctgaagaatttcttctgcctgttccaatgtttgggtaaccggcttttcaatgaaaaaatgcagacctttttcaatcgcttttagcgcataatcgtaatgataaatggtgggcgttacaatatccagcatatcgatctgctccagcaattcatcaaaattctcaaaatatttatatccgaattccgcttccagtttttttccgttttctgcgtctttgtcgtggaaaccgatgaattcgtatttatctgactgatttaaaagtcgtaaatgtatttttcctaaatgtccggctcctaccaaacctgctttcaacatagctgtattaaatttctgtaaatataacaatttgttgttggttgtacgtagacccttatcagaaaattaaaaactgcatgtaacagtttttaacccccggcaaaatttcatatttttgtgcgaactgttacctgcaacctaataactactatctgtaatgacgcaagattcgtttgtacataaaggaaaaagaaagattttagtggaatatctccgaaacagaatcgggatttcggatgaaaacgtactttcagcgatgaatgaagttcctagacacctttttattgaaagtattttcgaagattttgcctacgaagaccgagcttttcctattcttgcgcatcagacgatttcgcatccttcaaccgttgccgaacagtctgaacttctgcaggtgaaagaaggagaaaaagtgttggaaataggaaccggttgtggctatcagaccgccgttttaatggcaatgaaagcccatgtttacacggttgagcgacaaaaagatctttttgatttttcaaaaaagaaactccgtgaaatgaatttatatccaaaatttcagagttttggggatggatttgccggacttcctacttttgctccgtttgataaaattatcgtgacctgcggcgcttcagttttgccaaccgaacttctgaaacagcttaaagtcggcggaaaaatggttattcctctcggatcaaccgatgagcaggttttatacagatttacaaaaatctcacagacagagtttgaaaaagaggaattcggggcttacaaatttgttccgatgctgggaaatacaaatcagtgatgtgtgtttaattgggatggatgaagggtaagaccgttttcagaaataaattgaagaatatcttttctggcagcaaaaattcattcaatttgattttagtaaaacctgcatcaacacataaaataaaacagaataaatttttaattttaaagaattaaaaaataaaaatgaattctgaaatctcaaaatataacagttctcaagcagaatccgatcgggaaatctgcgaaagactttctgaaattatctgtgagaatcttattgatgctgaatctaaaatctggcattctcatcctgtctggtttttagacggaaatccgattacaggatacagtaaacaaaaaaaaggaataagactgatgttttggagcggcaaatcttttaatgaagaatttctgaacattcatggaggaaaatttcaggatgcttctgttttctataatagtgtctcagaaattaatgaagaagatctgaaacgagctttaaaaaaatcggaaaccattcagtgggattataaaaatatagtgaagaggaaaggtgaattaattttaattcaaaaataacatttcttcaaaattcggaacgaaaattgaatagtcgtaattgtctaattaactaaaatcttaatatgatgaataccaaaagatttaaaatattacaagatttcagtaatattcagaacagttttaaaatgaatttccgaaacagagcagaaggtaatccggataaaaaagaatccggaaataatcttcagataaaggatttcaaagctaaaaagccggaaccgaaaagaaaagtaagaagatctgcactggaaatctgggaagaaatagaagaactggcatccgaatcttagaaaaaatgaatttaaagtataatttttaatattaaagttgaaaaaccttgcttgtgaaaagtgaggttttttacttgaagaaatcatttaaccatcacagaaaaatatgaaaatattcatcaacaaaagaattcctgaagcaggtatcaaacttcttaaagaagcaaatcttgaaatattcattcctgaacataaaaatctttcacacgaagaatggctgagttactgcaaaagcaatgatgccattttaagcgtgggaggagagtttaaattcgataaagactttttcaacgaatgtccaaatattaaggcgattgccttgttttcagtaggttttgatcatgtggatattaaggaggcaagtgcaagaaaaattccggtcggaaatacacccgatgtgttaagcaaggcaacttcagatgttgcatttttacttatgcagtcggttgcccgaagagcaagttataattttgaaaaagtaaaatccggaaactggggagattttgatccgctgcatgctttaggtcaggaactatacggaaaaactttaggtattttcggtctcggaagaattgggtacgaaatggcaaaaaaatccaaagttgcttttgatatggatattatttatcataatcgtcaccgcaatgaagaagcagaaaagaatttgggagcccaatatgtttcttttgatgagcttattgagcagtccgatgttctgagcattcatgccaatttcaaaccggagcagaacgagctttttaatgcttctgttttcgataaaatgaagaagaatgcaatcttcatcaataccgcaagaggaggctctcatcatcagaaagatctttacgatgcactttcaggacacaaaatctggggagcaggacttgatgttactaatcctgaacctatttttaaagacgatcctattttagaactttctaacgtttgtgtgcttcctcacattggctctgcaacggaagaagcaagaaacggtatggcgaaactggcggctgaaaatcttatcgcattttcaaaaggagaaaaaatgcctgcctgtgtaaatccggaaatttacggttaatatcttggaactatttttgtttaatgataagtaacaccaaaaaaatagcattatgatacccgaaaacagcgaacaggaacaggaaagaagactggaacagcgagagtataaatccagtgaagatatttttaatcaggaagagcatatttccttagatggaaacggaaaaccaatttttaatgaaaaaaatgatgatgacaaactggataaaggattggatattcccggagtggaagatgatgatgaaatggaagaaatcgggagtgaagatgaagaaaataactactggagtctaagcgataatgatgatgatcatgaagaggaaaatgacgatgttttaagataatatcaactcagtatcaaataattgtaaaccttgctgttcaggcaaggttttttttgtctatatttatattgtaaattattatattctgaacttatttaaaaatttgttatgaataccatgtaaataattgtttacaattgataattgtgtcataaaaaatggtaaatttatcaataaatagtgattaaaagaaaacttgattatgataaaacctttacaatttatccttgtatggatgagtgttttcgggcttgcccaaactcccggaaatatcatcatcaaagacgcagtcggcaacgagagctttaatgttacctgtaccaatggtcttaatgcaaacggctgtattgatcttcatgtggagtatcctgtcattaagcagaccacaaattatgaagtcgtttcacaggcttttgctcctccgatagctctgaatcagggaactccgcttaatgccaattacgatgatgcttttcctaccaaactggatctgccttttcagttctgtttttacaatcagaatttcaatgccttggttgtcggctcgaacggaatggttacttttgatctgagccagttgggaaacattaactatcccaatattcagtggcagaatcccaatgttagtcttcccaaaaattctattttcggagtgtacaacgacatggttttttcgtcaaatgatccctccgaaatatattattccaccatcggaacggctccctacagaaaattcgtaatcagtttttatgaaggaagaattgcaggatgtacagaaagagcttcctcgcagattgttctgcatgaaaccacgaatgtgattgaggttttcgtggataaaaaaccaacgccgtgtccgacaagaaaatttgaaaatgctttaataggcgtaattaatgcagacggaacactcggtgtttctcctcccaacagaaatacgggcgtttggcaggctttgcaggaaggatatagatttaatccgcttggaaatgccattcaaccggatgtaacgtggacaaattccgcaggacagacggttgctacaggaattcaggcaacaatttgccctacccagaatgaagtgtatacggcaactgcggtatttaatacctgcggaaccagtaccctaactttaacagatgattttcctttaacatttgatcctacgtatccggcggctaaaaatttcactcaggattattgcggaaatactcccgtaaaccttactttaagcagctttcagggaaatgtgactacacaaaatccggcgaattttgtgttcagctttcatacaagcttgcagaatgcccaaaataacgtcagtccgctgccgaataattatactttaacagccagtacggttttatatgtaagaattcagaatcccaatgttccgggctgttaccgggttgctgttttaacgttaaatttacagacgaaaagcttactcaaaaatacagttgagatttgtgataccaataacgatggagtagaagcgaactataatttatcgtttctggatcctgaacttttcgcacccggaactacaggaatttcttattttgcaacacaggcaaatgctcagaacaataccaatgcaatcagtaccatcaatgtaacggcaggaacaacggtttgggtaagattgcaggaaggaaactgtacctatgttttaggtccggtcactttccagttcaaaccgggagttaatcttaattctccgattaactataactactcaacgtgtgatatcaacaatgatgatgcagagccttttgattttcctttaactttcggaccgctgatttcatcacaaccgggagctgtttttaccgcatatgcaacctacaatgaggcacttacaggttcaggaggagttttaagtaccgtgcatgaaggaacttacactatttttatcagagttcagattccgaacggatgtattgcggttgctaccgtaaatctgaatgttacgtttaataaaattgtcgtgaattctaagacagaatacatctgctttaacggaacggatgacatcagtatcaatttaaataccctttcaaacggaatgctggtttctccggcaacagttcctgtggtagagttttattcaaattatcccgatgcaagtttcggaataaatcctataagcccgaatcagatcatcacgaccaacggaaactttgttacgcagacctattatgtacgtttcgaaatttcagattcgtgttataccataagacctatcacgatcaatttggttcatccggtgatcgaacagtccagttttacggtttgtgattttaataatgataatacagaaaatgtacagttgtcacaattttcatctgcgatgatcggaagccagaatgctgcggtaactttctaccttactgctgcggacgctgtaagcggaaacaatcctgtgaataacgttaccttcaccggaacacagcagttttttgtgaaaatcaactcttataactgtgagcagatttatcctttcaccgtaggattaacttctacacctgctgtaagtcctcaggtaacggttaacctgactaatatttgtgacaacaataatgacaatacggaaatctatgatcttacacaggcacaaagccagattacaacaagttccaatgtaaattttacgtattatctgaactatgatccggtgacacacattttcaccaatgaaattacaaacccgacccagtttgtggttaccggaggaactgcaacagtttatgtaaaggttaaatttaataacaacgattgtttttcagccgttaaattaaccattcagatgtcattcttacctcctgtagttctgaacaatgcggtattaaataaatgtgatgaagattttaatttaagtgaaactttccagttgagtgatgctacttctcagatgtttattccggctcagaacacctatcctttatcgaatatcaccgttacttattataatacacaggcggaagccaacgcaggaaaccctgccaaccagatcggaaataccgttacaaccaatatttcgactgttcaggtctgggcaagatttcaggtgaatacaacaggatgttattcagtagcgtcaattgagctgaatacgtatttccctccgaaagccatcaattctaccatttcagtttgtgatgaaaatctcgacggaagttatgaagtaaaccttttaaattttaccaatttaatggttgatgcaccgaatcctgcgaatacatttaccttctatcttacacttctggatgcgcagaacggaaccaatcctatagccaatccttccaactttacagccaatcctttccctgcacagatgtgggtgaatgtgcagaatattccggggtgtaatgatattgcaaccataactttcacttacggaaataaagtaaccctgcttaataacgggcctttccctttagcaacctgtgatatcggaaatgacggatccgaaacggtcaatttaacacagttccagacacagatttacaatggcggaaacgttacctttacgtattatgcttcattagcagatcttaatgcgggaaccaatgccattgccaatccttcagcgtatctttataatcaggtttcaggttccagtaccatttatgtgaaagtaagcgttccgggttcctgttccaatctcgtgcagattcagctttcactgaagaaaacgcctattttcgatatcccgacattgtatttctgtccggaaggctcattgagcagttattctgtaaacattaccaactataccattgtaagctatcagtggactaatcctgcagggcaaaccatctctacaacgaatacgattacaggaattaatacagtaggaacttattcattaaccgtgacggcagataacggatgttcttacaccaagactttcgaaatcaaatattatgaagttcctgttattacaagcattcagtttaacggcaataatgtaattatttatgctacaggttcaaaatcaatcctgtattctatcgacggaatcaattggcaggtaagtaacagtttcaataatttaccgacaggaattaccacattctatgtgagatttgccgacagcgactgtattgtgaaaaaagacggtctggtactggatattaccaatgcaattacaccaaatggtgacggacttaatgaccattgggtaattaaagatcttcaggtattcggaacaaaaatgtctaaccttaaaattttcgaccgttatcagatgctgatttttgaacagaattcaaatacccagttctattgggacggaatgataaaaggaagagtgcttccaaccgcaagttactggtatgtaattaccataccggacggcagaacatttaccggatgggttgtggtgaaaaatcataattaaatctaaaaaatcttttcatactaagcctcattgaaattttcagtgaggttttttatttttgaaaatcttaaaccttcaaattatccataatggaaattcccctcctccggaggggtggcaaaaatttatgaaaatttttgacggggtggttaaattgaaagacacaaaacaataaaaacaacaaataatgaaagaaatccttacaataattaatggagttcctattcgcaggaattttgtggaaaatctgccctacaatccaaaattaaaacctctgttgcacggaaaacgtaaagccggaattttgagtgaagtcattttctggaaacaggttcgcgcaagaatatttcataacattgattttgacagacagagaatcatcggcaattacatcgttaatttttatgtgaaaaccctcggattagttatagaaattgacggctggagccacgaaaccaaagaaatttatgatgaggtaaggcagaaatatctggagtctttaggtctgaaaatattcaggataacagattttgatgtacgacataatttgtctgttgtgatgaaagatttagaacatttcatcattgaacattataaatgcaaataaaatgtccatcacaaaattcccctcctccagaggggtggattcgaccaaagggagaagacggggtggtaaaattataaacaaaaatatcactcggtgattattaaaaccaccccgtcaaaaattcttccgaattttcgccacccctccagaggaggggaattttcatgctgtttcaaattttatcacattagttgcagggattttctaatttgaatatctttaaaaccacaaaaataaatctgctaaactaacaacgatcaacaaatacatgacattccaacaacagatacagcagggcatacccaaccgtttgccacagccgaaaccttacgaaaccaacatcaatcatgcgccgaagcgtaaagaaattttaggggaagaagaaaaaaaattggcactgaagaatgctttgcgctatttcgagccagaatttcatgccgaattactgccggaattcagggaagaactggaaaaatacggaagaatttatatgtaccgtttccgtccggattatgagatgaaggctagaccgatctctgaatatcccggaaaatcggagcaggcaaaagccatcatgctgatgattcagaacaatctggattatgccgtagcgcagcatcctcatgaactgattacgtatggtggaaacgggggagtgttctccaactgggcgcagtatcttttaacgatgaaatacctgtctgaaatgacggatnnnnnnnnnnnnnnnnnnnnnnnnnnnnnnnnnnnnnnnnnnnnnnnnnnnnnnnnnnnnnnnnnnnnnnnnnnnnnnnnnnnnnnnnnnnnnnnnnnnntctgccatatgcgcctattgtttttacccggaaaaaccatcggtaaatttcccgaactggataaatgcatagatgccaaggacaactaaatataattcaatattttagcgtcgagttcacgttaaataaaaagcatgattccaacactattaaattattgaaaccatgcttaataatataagcttgattgctgaattttctgaaacattaagaggatttaagtagttaagttagtttagaaaatcaaattgattttaataaggataaaactaaaaaagcgaagctcatcttaatattctaaactccttaacagaaatcttaatggtttaaactaagtgcaaataattttaattctggtttttagctaagactccaactcactaacgctagaaccctcaaactctcaaacttaaaaagtaacatccagtcccacataaaaattagctttcatgatcggagcatacaccattccgccgtcaaaataattttcgaaaggatttttaacatcaacaatggcatttttctgataataggaagttaaattttctcctcctaaatacgccctgattttcttattgaaattccttgaaatctgtgcatttaaaacaacataagattcagaataggctggaagctgaaattccgcaggattcgatgaagtattaggaagtctctgttttccgactgcattcagtgtggtatcgaaactccagaatccacctttgctgtttttgttggtagagtaggcaagattcacaaaacctctgtgtttcgccatgaaaggaacttcacgtcttccatccagataatctgcctgaacatcgtaatatttgtaagccagtctcacctcaaaatttttaaagggaatgaaatcccactgagtctggaaagaattggcgaaagactttccgtcaagattatagaaagtcaattgttgaggagaccgatccagatccaccatcacctgattctgaaaatctgttctgaaaaaatcagcaacaacagtagattttctcccgaaaagtttgaattcctgctgtaaactggctccgtaattccaggcaatttcagatcttaaaccgtaaatattccctccgttctgcaatacctgaatggatcggccggatgcaaaatactgctgactttcggcaaaaatattggctgttctgaaccctcttcctgcggaaagtctcaaaatcgtctgcggggtaaaatcatatttaaaattcagtctcggagtgaactgcgttccggcaagattatgaaagtctactcttgctccggcaactaaggtgtattttaaacctgttaaagtatattccgcaaaagctcccggaacaatttcgtttcttttaatagttgaggttaagtatgtttcgtcatatccatcatacatgaaactcgctccggctttgtatttatgattggtatttcccaaaatactttcaaaaattaaattggaataatacgtctgctgctttccggaataatttctcagtccgaaaaagctgtcctgctgatgaaaagtatattggttcatccagcccagactctggtaaggttttcctttaaaaacatagcctgttttattccagacctgaaatctggagatgtcaattccaactccgtacagcgactgcttttcctgtggcacttttttatcgaatccgatctgtcccgaagttctttcgtctttgatgaaattaattccaaaatgcgaacccaatcctgagttctccaaatcgttgtaattcaataaataagctgcgtttaattgagttcctttcggtctgtccagaaatccgtcatcattcatatcagtatctccgaaagttccgtttccatgcagtaaaaatgtctgtgaccatttttcattgatgggcgaaacactggtgatattggcttctgctcttccgttaaaatctgaaaataaattcagtgaagtttccggcttttctgcatttttcagaagttctgtatttatttgtcctgtaatgctttcataaccgttcgttacggtacttccgcctttggtaagctggatgctttcaatccatcgtccgggaatgaaactcagtccgtaagcggaagccaatccgcggatttcgggaagtaattcttttgttaagctcgtatatttttggtctaaacctaacattttcagttgttttgtccctgtaacggcattgctgaaagaaacatcaactgttgcattggtttcaaaactttcagaaaggttacagcaggctgctttcagcagttcttttttatcaatattaaaaataagccctgcttcttttttgtttaaagacgttgctgcttttgaaccgtttactgtaacaccttctatatttttttcatgactgctgtgatttttacccgcttcttcatgatcattgtggtcggtgtgttctgaaggatttccttcttccgcatgaactttcggatttgcttctccaaaaggaatttctctgtcatacagacagcatgaaggcaggtttttataggtattatcgctggatttatacttctcgttatcatgaccaacttccgcaattttctttaaaattttgtctgatgatgttttattcggatcaaaattcagcgttacaatttgtctttcggcatcccattctgcggaatctgctccggcatcttttgccgctttttcaattcttactttgcaggattcgcaattgccttttacataaaattcattctcttttttagcatgattttcatgattttcaatggtttgcggttgtaaatctctggtgtaatgacaacatcccggaagagcttcatacgtttcagcagaggctttgaatttttcattgtcatgacctgcttcggcgattttttttaagatttcatcagaagaagcattgttgtctgtttcaatggttaatgcctgtaaatcaattgaatagattgctttttttgcacctgctttcttagcggtattttcgattctttctttgcacatttcacagtttccttttactttgaactggttttttgaaagattctgggcaaaaatacattgtacggataataagaatacaccaagaataatcctggaaatatataatttcattttgtttaaaatttagattaattaaagcttgaatgctgcaatataaacatcatgtcggtaaccagtcattgtgatgccagtcaaccgatgtttagtaacattatttttaattaagctattttcggcggctgccagatttcttttaaacggcttgaaagataaggatccgaatattcaaactgcgagtttttattcgatttgtagtatgaatattctaattgtaaactcttggaaaaaggagtttctataaaagtataacaggctaaacacgttgaacagcaatcgtcgttacaatttgatttctgttcttttttgtgatgattgttttcggaattttgagaatgatcttttttacagcagctcatttcagcatcttttttgcaacagttttcctgcatattctgtgcatagaaactgtctttaggaactaaaaaaattcccaagcagaaaataattaagatgatctgaaaaaatttcatttgtacaaaaatacaaaatttcttacaatggctctccaacttttttcgcacaatcatgccaaggttctccatgcggaggatttaccgccggtttcggacctgttggagcaggggtcggagcgggtgcgggagtgttttgtgccatattctgctgtacaggctgctgaaccggagcaggtttgctattcaaaggctgtcctaccggaatatcgcatcggtgtcccggttctccgtgaggcggattcatccctttcggagtttttacggtttttgcttttccgctttggtctacggcaaattttccgggtttcagagaattcggatcaatctgaatggtctgtccctgcggagcatttaccgcaacattctgagttccctgttgaggttgtgcaggagcagaatttaatggctgtcctaccgggatatcgcatctgtggccgggttgaccgtgtggcggattcattccgggagaagtaacggtggaagttcccgatcctgttgttgttttaattcccgcctgatccagaatagaagctttaggagtctgattaaccgctataggagcctgctgaactccggtttcttctttaagataagtagctctctcatccttcttacacgatacagtaaatatagaaatggcaagtatgcccaacaatgtatttttcatataaaacaaaattagcaaaacatttttaaatgctttgctaattttataataatagtctttttttagaattaattcttaactaaaagcctgaatccttctccgtgtacgttgatgatttccagtccttcgtcgtctttcagaagcttacgaagtttagcaatataaacgtccatacttcttgctgtaaaatagttttcttttttccagatttttctcaatgctaaatctctcggcatgaaatcgtttctgtggatgcaaagaagtttcaacagttcattttcttttggagaaagcttgtattcgttatcgccaactctcagttgtctcagcatagaatcaaagaaaatattgctgattttaaactgttcctgctcttcattttccaatgtggaacttctctgaagtatagctttaattttatataaaagaagctcagtatcaaatggttttgtaatataatcatctgctcccagctgatatccttttaagatatcttctctcatatttcttgcagttaagaaaatgatcggtgtatttttatctatcttttttacgtcttctgctaatgaaaaaccgtcttttttaggcatcatcacgtcgaaaatacagatatcgaattcgttttccgtaaattctttcaatccctgttctccgtctgtagcaagagtaacttcgaagttatttatcgttaaataatccttcagcactgccccaaaactctgatcgtcttctactaataatattctgttgctcatagttttaactattaatcgttaataattttgaatgaacaagtcattctcctcttttctaatatttgtttattggttaaatttttatctatgccatcggaagctttattgtaaacgtacttccttttcctttttgtgaatctacaataatctgtcctttatggagttccacaatctttttaacataggaaagtcctaaaccctgtccttttacattatgaatatttccggtttcttccctgaagaatttttcgaaaattttcgttttattctgggtttccattcccattcctttatctgaaacttcaattacataaaaatgcccttcgtttcttgttttaatagagatttcaggcgtttccggcgaatatttgttggcattgtccaaaagatttaccagcatattcgagatgtggaattcatcaattttaaaattataattcgttgcattaaattcttctctcagtgtaccgtttctctgctttacaataaggctgaaagattccgccgttcttctgatcagttctcttacgttggtttctttcaggaataatttcacttcattacgctcaagtttagacatattcagaacgttttccacctgctttttcatcctcagattttcctgcttaatcagttccgagtagtattttaccttttccggattggttgcaatcttatcattcgccaaagaatctgttgccacagaaattgttgccaaaggagttttaaactcatgagacatattgttgataaaatccgttttcacttccgccagttttttctgcctcatcatataattaatggaaataatataaattcccaaaatggtaagaagcgaaagaaaagttcccaaaagcatcggccagttgttcatggctaaagaataatctttctttggaaataccagagcgagactgtaaagtgttctttctttctgatctgtaaaaagcggataactatacgtattgttgtcttttttctccttataatctttattaaaaactttggtaagattattattcttatcaataattccatagccgaattttgcgctgattcctctgatttttaattctttggtaataacagaatctaaaatttttgcatcaactcttttgctgatcggtaaattatttcctataatcttcgcatattctttcatcgcataatctccattctccagatcctgattaatgtctgcggtaagaatttcacgattggtcgtatctctttttattttataagcagcttcatcagaatacagttttgtaagcttaatggaatctccctgtttggaaatcggaagctgacttttttcaataatatttttagagtaaataatctgtctctgcgttccggaatcttctacctgctgaatcgtcgttaacgtaggctgatcgctgtttgctaaaatattgtttctgaaatctttattgtcaatatttaaatatttatctacttcaatttcttccatgtttttggaagtactttccaatgcggaatacactttattggaaaactcctgttccagtgcaccgtaataatttttcagccaataaaactggagcgtaacaaagacaatcagtgaaattgtcataaacaccgaaattattgggatgaacttattattcatttactttattttaatcgattttgaaataatgagtgttaaaattaattattttatgacttgataaacaaaaaacgcgccaataaattgtgtaatttttcttaaaaacgcgttatttaacatttttttataaatttttaattttttattataacaaccgctgtgcattaaaataaaaaaggaaagtacattttactttccttttttatcactaaagtatttcctcatcctgaaaatactgaataattgctttcttcattaaaagctgctgctcattcggtttcagttccggaagatcttccagcttatcgaagtgaggatatccgtcgtcgtcgtaatgcgaaaatttataatatccgaaaggctccagtaatctgcacactgcaatgtggattaaattcaccttatcatcttttgtatatttctgctgtccgcttcccagttcctgaagtccgatcaggaaaaggtaggtttctatcggagcatttttttccgtatcaaaattttcaatgaaaaattgctctactttttgccatagttccgcttcgttcatcatatatcaattctttttattgtttattctgttttttcgggaaaataaacataatccctatattttgccttccaatttcatcaggaaagcatattccaaagcatcttctttcaaagattcaaatcttccgctcgctccgccgtgtcctgcgctcatgtctgttttgaaaatcaggatattgtcatccgttttcagctcacggagttttgccgtccattttgcaggctcccaatattgtacctgcgaatcgtgcaatccggtggtaatcaaaagatttgggtaatctttagcttctacattatcgtacggcgaatattctttcatataatgataatattcttcgtcattcggatttccccattcgtcgtattctcctgtcgttaaagggatggtttcgtccagcatggtcgttacaacgtccacaaaaggaacctgtgctacaattccgttaaacagggaaggttcataattcattaccgctcccaccaatagtcctcctgcgcttccgcccatggcgtacaagtgctttgaagaagtgtaattttctttaattaaaaattttccggcatcaataaaatcgaagaatgtatttttcttgaacagcatttttccgtcttcataccattctcttcccagatattctccgcctcggatgtgggcaatcgcgtaaataaaacctctatctaaaatagaaagcctcacgtttgaaaaacttgcatcaacagtgtgtccgtaacttccataaccatataaaagtaaaggcgtatccgcagattttggggtatctttatggtaaaccagagaaataggaactttcgcttctccgtctctggaatctgcccagattctctcggaaatataattttcggcaaagaattttccgcccaaaacttcctgctgtttcagaagctttgtggttttttccttcatattatattcgtaggtggaacttggctgtgtaagagaagtgtagccgtaacgtagaacttccgtatcgaattccagattaactccgatgtaagcggtatatgtaggatctgaaaatggaagataatgcgatttctgcgttttttcgtcaatgatcttaatctgtaacagaccttgttctctttcctcaaggaccagatagtttttaaagatctcaaaaccttccagcagaacttccggacggtgcggaataacatccacccagttttccattccgcagttatggatctttgtctttacaattttgaaattaaaagcatcgtctgcgttggtaatgatgtagaattcatcttcgtaatgttcaaccgaatattccagatcatctattctgggctgaataatcgtccagtctgcgaaaacgttatccgaaggaataaatctgtgctcatccgaaatggtactcgaacttgcaataaaaatatattctaaagattttgtcttgaaaacatttacatcgaaggtgtcatcctcttcatggaaaatcagcacatcatctgaagaatctgttcccagtttatgtctgtacacctgaaaagctcttaaactttcatcttttctgatgtagaaaatatgttcgttatcatttgcccagactgcttttcctgtagtgttttcaattttatcaggaagaatttctccgttctgtaaatttttaaatttaatggtgtagattcttcggctcacattgtccgttgaaaatgaagccaattggttgtttggagaaacagcaacatttccgacttcaaaataactttcaccttctgccaaaatattaacgtccagaataatttcttcttcgttttcaagactttggtattttctgcagaaaataggatattcttttccctcttcgtaacgaacgatgtaccagtattcgttaaaaaaataaggtaaagattcgtcatcttttttataacgggctttcatttcctcaaaaagttcttcctgaaaagactctgtatccttcatgatgaaatctgcatattcattttcttcttcaagatattgtatcacttccggattttctctttcattgagccagaaatagggatctaaccttttatcaccgtgtatttcaagtgttttttctattttttttgcctttggagcttccattcaatattaattcttgttcaaatttagttaaaaaaaaaccatctttccggtaagaaaagacggttcctgtatatttttgtattaaaacttacttgtgtagcgctttaatatacttttccaaagccatcgtcatggacggagtttcctttgtaggagccattaaatctactttcagccctgcttcttctgctgctgctgaagtggttgcgccaaaaacgccgatttttgtttcttcctgcttgaaatccggaaaattctgctgtaaagactttattccctgcggactgaagaagatcagcatatcataatcttttacattgatgtctgtaagatcgctgcaaaccgttctgtacatgatcgctcttttccagtctacattagaagcctccattgttttggtaatatccggacttaaaacatctgatgagggcaaaagatatttttcgctcgggaattttttaaacagcggaagaaggtccgagaaattcttttccccgaagctgatctttctttttctgtatacaatatgcttttgaagataattcgcaatggcttccgactgacagatgtatctcatcgtatcaggaaccgaaaaacgaagctcttcagctaatctgaagtaatggtcgatcgcatttttactcgtgaaaataattccggtatattgtgtaagatcgatcttttgtgttctaagctctttattgtcaactccttcgacgtggatgaaagggcggaaatcaatctttatcttttccttctttgcaatttccaggtacggagacgactcacttggcgctggttgagaaaccaatatagactttattctcatcattgacagttattaaaaaaacaatagtttccaaagcaacaaaacgggtgcgatttggagcgtgcaaatatacaaaaatttataataccatttctcgggtaaaatgttgttcttatgaaataaatagaaaaacaccttgaaaatgaatacaaaagagaaaaagaaaatgtaatataaaaacattttatttctgtcgatcgggaaataatagtgggttacacataaaattattaacaaaaaagacaggataaaataaaattttgtagaggtaaaataaaaaacagtccatttttttccgtcaccaatgctttggaaaaataaaaatcctaaagttgattttactgcataaaaaagaataactgcaattaaacagaatccgaatttattaagctgatatcccaaaacctgaagatcagcaacaaatttaggaacaacaggaatatactgtgagattaaaaccgaaagcgtaagagtgataacacaggaagtgattacccagctcggaaggttgttactggcatcaaaatatttttgaagaagaaagtctttcaggttggcttctctttctacgacgttcatcataaaaaggtataaaaagatacagcccagcaatataaagattacccaatcgttattttcaggtattcttacatgatttataaatgtttgtgataacggcaacggaatttttttgcaaaattatagattattttgtataaaataaaaaggttaaataaactatctttgcaaactgaaatgaaaaaactggtcataattccgacttacaacgaaaaggaaaatattgaaaatattatttccgcagtttttgcattggaagatgactttcatattttggtagtggatgactcgtctcctgatggaacggcggatctggtgaaggatttacagaaaaaatttcctcactatcttcatctttcagtacgaaaagtgaaagatggtttgggaaaagcatacattcatggttttaaatgggcaatcgaaaacaagtatgactatattttcgaaatggatgccgatttttcgcacaacccgaatgatcttcctaaactgtatgaagcctgtttaaacgcagatatggcaatcggttcccggtattccaaaggagtaaatgtggtaaactggccaatgggacgtgttttgctgtcttatttcgcttcaaaatatgtacggtttgttttaggacttccgattcatgataccacggcaggttttgtctgcttttcaagaaaggttctggaagaaattggtttggataacgtaaaattaaaaggatatggatttcagatcgaaatgaaattcagggcttttaaaaaaggattcagaattgtagaagttcctattatttttacaaacagaattctcggagaaagcaaaatgaatggcggtatcattcatgaagccgtttttggagttttaaatttaaaatggaaatccatcatcaacagattatgaaaaagctgatcttcatttttgttctgatgtgtctgttttcatgcggagactacatcgataagcctaaaaatctgatcccgaaagatcagatggcagaaattatggctgatctttccattaacgatcaggcgactttcatgtatcccaacacgaatctggaggcaggaacaagatatattctgaaaacgcacaatgttaaatctcaggattttgtggaaagcttcaaatattatgtagtaaaggaacagatgagcggtatcgcagatgatgcccagaaaataatattagagaaagatccgaaagcggatcagtatgtaaaggataaaaaaaataaaacaggaaatcttcagaatcctcctgctttatcgagataatttaagatgcaaaagttttttaatatagaaaaaacctctgagggaaaggcgagagccggagaacttaccacagatcacgggacaattcagacgcctatttttatgcctgtaggaaccgttgcaagtgtaaaaacagttcatcagagagaattaaaagaagatatcaaagctcagattatactgggaaatacttatcatttataccttcgtccgggaatggaagtcatgcaggaagccggaggtttgcataaatttatgaactgggatctgccgattcttacggattcgggaggttttcaggtgttttcactggcaagcagcagaaaaatgtctgaggaaggagcccgattcaaatctcatatcgacggaagttaccatatgttctctcccgaaaaatccatggagatccagagacagatcggagccgatatttttatggcttttgatgaatgtgtggcgtatccatgcgaatacaatcaggcaaaaacatccatggaacttacacaccgttggctgaaaagatgtatcgaatggacggaaaacaatcctgagttgtacggtcacaagcaaagacttttccccattgttcagggatctactttttcagatttaagaaaaatttccgcagaagtcattgctgaagccggagctgaaggaaacgcaatcggcggtctttccgtaggcgaacctgaagaggagatgtacagaattacagatgaggttaccgatattctgccaaaagaaaaaccgagatatttaatgggagtgggaactccgtggaatattctggaatccattggtttaggtattgatatgatggattgtgtgatgccgacgagaaatgccagaaacgcaatgcttttcacttggaaaggcgtgatgaatatgaaaaacgaaaagtggaagaaagatttttcgcctctggacgaatttggaacaagtttcgtagacagagaatattctaaagcgtatgtaagacatttgtttgtttctaaagaatatctggcaaaacagattgcttccattcataatttagccttttatctggatctggtaaaagtggcaagagaacatattatggctggagatttttaccagtggaaaaactccgtggttccaattcttcgtcagagattataattaaaaataaaaacgcagtaaaatgcttaagataatagaccgatatatcgttagaaaataccttggaacattcagtttcatgctgatattgctgtctattgttgttttggtgatcgatgttcagcagaaaattccaagaattgaaaatgcaacggcattagacccgaaacttaacgttacctatttcctgattcacttttatcctttctggatcgtgaatctggtgatgacgtttctttctattctcgtgtttatttcggtgatttatttcacctcaagaatggcaaacaataccgagattgttgccgttatcagcagtggagcgagttttcacaggtttgcaagaccttatttgcttacgtcattgtttatcgctgttttatcgttgggaatcaatcattttctgcttccgtgggcgaatattcagaaaaaccagcttgaagcctatacctacaatgcaaccaataaagagaaagttttagggacagctccggtttctgcgcaattaagcaaaaccgaatacatctttatcaattcctggaacaaaagagacaaaagaggttcaggattcgtctatcagaagtttgataaggacagaaggatgacgtacgagctaaaggcttctgatgtttcgtgggataaagacaaaaaagaatttgtcctgaattcctatacggaaaaaaccatcaataaagacgatacagagaaattatccagcggtttcgatctgaagaaaaaatatggtcatgatccggaagaacttttccctaatgaacttttagggcagaataaaacaacaccggaactgataaaattcattaaaagagaaacagaaaaaggaaacagcaacttaaatgcacacttaaacgagcttcatcagagaacctcaatgcctttttctattgttattcttacttttttagcactgtcgctttcttcacagaaaaaacgtggaggattgggaattaatttagctttaggaatttctttagcctttgttttcgtattttcctttgaagctttaaaagtggtttcggaaaataaaagtatttcgccggctttggcgatgtggcttcccaacatgatctttttaccgcttgctgcttttctttacattaaaagagccaatcagtaaagtaattttatttctttgtgatagaaagactgtagtccgtcattttcaagatcaatccagagttcaccattttcgtcagcctttttgatgatgccattttggcgcgttttttcaatttcgaaaacagatatttcgtctttgcggaacaggtttgcattgaaaagcttgagaatttcctcttccgaaggaatatttttcagtttttcggttaaaaaatcatgaagtttcaacgtaaaatcattcaggttaaaatttcttccggtctgcgttaaaagcgatcctgcattggaaatttcaaatttttcctgcaaaatattgaatccggctccgattaggaaataattattctgattaaattttttcttttcaatcagaattccgacgatttttttatttttaagaatcatatcattcggccattttatcttcacgtcacagtcagtcaaattggcaaggaaatcccgtattgcaattgcggtataataattgaacataaaatccgagactttaaagtgttcagcctttacagcaagagtatacgccaaatttttttcagccgttgaagaccatgtatttccgtactgtccgcgacctttcgtctgattgaatgtatgaactgcaataaaatctgaatcttcgtaaagtaaaaacttagatatttcgtcattagtagaagaacattctttcagataaaacagtgcactcatttaagaaaactttaagactttaaaaggctaaaaataaggctaaagtaaaagaaaaacaataaatttgcagattatagtattttttaatgaataaaacagtagaaaaacaagcgctaatagataaaattgtagaggctatccaggatgtaaaaggtgaagatatcatgatctttgatctttccaatatcgaaaattcagtagcagaaacgttcatcatttgtagcggaaactcaaatacgcaggtttcggcgttggcgggaagtgtagagaaaaaagtaagaaacgaccttaaagacagaccttggcacgtagaaggtaccgaaaactccatgtgggttttggtagattacgtttccgtagtagtccacattttccagaaagaagtaagagagtattatgatattgaagaactttggggagatgctgtgattacgaaaatcgaaaattaattattaaattttaaaaagtataaatgaacaataaaggatttaactggttttttcctatcatgattgtagcacttgtgctgttctttgttgccaattctatgggcgacagcacgggtaagacaattgatgaagacggtttcttcagagaaatgcaggcagggaaagtccagagagttttaattgacaaacaggctcagaaagctgatgtatttttaacgcaggctgccaaaacagctaccgtaaaaaaagacgataaatctaatcctttttcggggcttatgatggctccaaaggcagattactcgcttaaatatggagatcttagacttttccttgaaaaatttgatgccatcagaatgcaaaatccggcgataaaaacgtctaaagattatgcggaaggcgaaagtccgttaacgagctttttaattcaggctttaatctggattgcgattttaggaattttctatttccttcttttcagaaaaatgggaagcggaggcggacccggcggacagattttctccatcggaaagtctaaagcaaaactttttgacgaaaaagaaagaattcaggtaacatttaaagatgttgcaggtctggaaggggctaaagaagaagttcaggaagtggtggatttccttaaaaactcagaaaagtataccaaactgggaggtaaaattccgaaaggggttcttttggttggtcctccgggaaccggtaaaacattattggcaaaagcagtagccggagaggcgaaagttcctttcttctcgctttcaggttcagattttgtggaaatgtttgttggggtaggagcttcaagagtaagagacctttttgctcaggcaaaagcaaaatctcctgcgattatctttattgatgagatcgatgccatcggacgtgcaagaggaaaaaataatttctctggcggaaacgacgaaagagagaacacgctgaaccagcttttaactgaaatggatggtttcggaaccgatacaaacgttattgtaatggctgcaaccaacagagcggatattctggataaagctttaatgagagccggacgttttgaccgttccatttatgtagaccttccggaattgcacgaaagaagacagatttttgatgttcatttaaagaaaatcaaacttgatgataatgtagacagagaatttcttgcgaaacaaacaccgggattcagtggagcagatattgctaatgtttgtaatgaggctgcgctgattgctgcaagaaataaccatacttcggtaacgaaacaggattttcttgatgcagttgacagaattatcgggggtcttgaaaagaaaaataaagccattaaaccttctgaaaaaagaagagttgcttatcatgaagcagggcacgccacgatttcatggttggtagaacacgcttcaccgctattgaaagtaactattgttccgagaggacgttctttgggagcagcttggtatcttccggaagaaagacagttaacaactacagaacaaatgttggacgaaatgtgtgcaacattgggtggtagagctgcagagcaggtaatattcaacaatatttctacaggagcgctttctgatcttgaaagtgtaacgaaaagagctcaggcaatggtaaccatctacggtttgagtccgaatatcgggaacatttcttactatgacagttcagggcagtctgaatattctttcggaaaaccttattctgaagaaacagcgaagaaaattgatattgagattaaaggaattatcgaaaatcagtatgacagagcagttcagattttaactgagaataaagacaagcttgatgctttggcaagtaagctattagaaaaagaagtaatcttccgtgaagatcttgaagaaattttcggaaagagagcatgggatcccgaattaacagaaaaaccggttaccaatacaattccggacgggaaggaaccgcaagaacagattcttgttgaagagaaagaaggagacagcgaaattcaggctcctgaaagccctacacagctttaaaatttcttagaatttaaataacacaaaacctgacagttccaaaattgtcgggtttttttatatttctcggtatgtttttggatttctatatgattaatttatatttttgtataaagttgactaaaaatagatcaaattgaatttatttaagaagattgtaagcaaacttaccaaccagcctgagcaggaagaaaagcagagtctggaaaagttaggagattccctgaaaaatgcggatctcgactataagtttgcccaactgtttacgcattccggaggattttttaactactgtgctgatgaagcggaggcgttacagactttgaaccagattattaaaattgaaggaattcacaatatattctgttgggataaagaccttcagaatttcctgaatgtggtaaaaacaccgtatacttctgaacttcagagtaataacgatgcaagtttcattacctgcgaatatcttattgcgtacgacggaagaattatgctttctcacaataatatccttcattatcattcttccagactgccggataaaattatcattatggcaaatatttcacagatcgtgaacaacctgaatgatgcgatgggaaagatcaaaagaaacggaaatatcaaaaatctgacttccatcagcggcggacagtcgaaaatggatacttcttcccataccaacacaaaactgtttttattgttgcttgaagattaagcatcagatttaaaatttaacatcttggacaaaaatctcattcaaagaaccttatcaggaattgtttacgtagcagttattattctttgtaccactccgcttggagccaatttaatcaacagtatttcgccggatctcgtgaagcagcagtatctgtattacggattaatcactcttttaatgggagtcggttcttgggaatgttttaaaatcatgaaattcgggaaaggctatgaacggtttgttgtttttcctttggtaatttttattttttatgtcttctcgaaaaggtatttcaattttgatttcttttttgatttcaggctcagtgaaatccttgcgatggttcttatcgtgattgctgctgttacattatttaaattcccgaacgaattatattttgacagcggaaagcttattttcaccgtaatttatgtggctctgcctttcagctttgctttgggacttcctaaatttacaagctatgacgacagtttttctttagaagttctgtttctgttcatcctgatctggagcagtgatacttttgcgtatttaaccggaaaatttttcggaaaacataaaatggcgcctaagatttctcctaaaaaaacttgggaaggttatatcggtggcgttgttcttactttaatcctgtcttactttgtagaacattatcatccggatcttcgcggaaactggatggtagtaggttttctggttgctgccttcgcgccgatcggggatttggtggaaagccaactgaaaagaaatttcgccgtgaaagacagcggaaacatcattccgggacatggaggtgtattagacaggctggatagtttcattatttgtgttcctgtcgtatatttgtactttattttagaaaaatttatttaatctcatgaaattacacagagaatcaaaaggaaccattaccgttgccaccattctgttcatcattttgggcgcattggcgatttattttcttgaaatgtggtcgttggtgatcattctgccattactggtaatctacagtttagtattttggttcttcagagttccgaatcgtgaaattctcgatcacaaagagaatgtaattgctccggtagacggaaaagtggtaatgataaaagaagtagaagaggatgagtttatcaaaggaaaagccattcaggtttctatctttatgtctccgcttaatgttcatatctgccgttatccggtttcaggaaacgtaatttataagaaatatcatccgggaaaatatcttgtagcttggcatgaaaaatcttctacggaaaacgagagaacaaccgttgcggtggaaagtttaaccaatcataaagtggttttcagacaaattgcgggatatgttgcgagaagaatcgttttctattgtaatgagggcgatacggcaaaagcgggacatgagttcggattcattaagttcggctccagaatggacgtatttcttccgttagatacagaaattgtatgtaaaattggtgacattacgaaaggaggtcttgatgtgatcgccagaatgaaggaagaatagaatctgatacaaaattattataatacagagagaggttttttagcctctctttttgtttttttaagagtttgcacagtcttttattacgctttactacgcatacgtataattgagtggaagcgtagtgtgtaaaagatcctctgatctgctaactttacctttaattgataccagacaatttaccgataatttcgatgtattactttattgaaatttattcttcaacgtataaatctggggtttaagatgtttgggttgaaggtaaaaatagtttatcacgttttaagtatatttgcaatattgaatttaaagtactaaacgataaattcagttctaaaaaaacacactcaatgatttacaaatttttcttccataaaggagaaaaagtggataattctgaaaatggttatgatcagttaattaatcgctacttactttttcttttttttatatttttattttattctctttttataattactttttacagggatattattgcttctgtttttctgatcatcattaccctgttctggatattgatgatctcaattgaagataaggtaaaaaaatctcataaaaatatcaagataacggttaccagtattttagtattccttactcttattgtaagcttttttaatatctatacatcaaaattggcagggatagaatatttttatttcagtattctgtttgccatacctcttttcttcaattatagtaaagacaagattgaaatttattttttagctgtgttcatcagctttaattttattatctgtctttattatgattttagctttttaccgagaagtaaatttttacaaaacaaagattacattaccataaaactcattaatattttattttccatcgtttcttttttaatagatatggtatttataagccagaaagatgaacttatcaacggattaatgaaaaacacaaaaattaaggattcaacaattgaagatcttataaaaaccaatactcagctcatgaaaaaccagatgctggtaaatcatcttacggacgaaaatattgaggaaatattcagactggcagagaaaaattcagttttgttttttgagaaatttcaaatcttttttccgggttttatccccgctattttagagattaatcctaacctcattcattcagaactctatttttgtgcattaatgaaactggattttgatacgaaaaagattgcccagtgtaccaataacagcataagagccgttgaaagtaaaaaatacagaatacgaaaaaaactgaatattccttccgatattaatatcaacagctttcttcttaaaatataagaccatgcagttttcagatttttatcatccggaattctgaatttgtgttaaaatattaataacgtgtgagttttactacgcgtgagtaacattgcgtatcaaaaattttgttacatcatttttacagagactaattttgcagagattataatctttatttaaaattttaatctaaaaataaaaaatgatgaatacaaaaattaccagatgtttagcaagaacattactgattgttctgttctttgcttttgaaaattttttttcgcagtacaacggagcagtagggatcaatacttcttcgcccaataccaattctgttctggacattgtttcaggaaatagcaataagggaattctcattccgcgtcttacagaaactcagcgaaatgcgatagtcatcaactcggcaaatgatgatggtcttacggtttacaataccacagaagactgcctgaactattggagccttgcagataatgaatggaaaagcgtctgcggacagataggaaaatcggtttttacaatcgattgttctaacacaaaagctgtgggaagttacgtaaaaggaaaagaattaaccacttccaattaccttagtgtgacggtaaatgttactaaaataggaaattatacgattatgggcaccacaactaacggttacaatttctatggaacaggagtttttttgaacacaggtatacaaacaatacaaattccgggacagggaactcctgccgcgatacaaacagacacaatacagctttctgccaatggagttgatgttacgtgtacaccaccagttacgattactgttctaagccctgcagcaacctatacaatgagttgtggaaaagcaatagtaaatggtgtatataaagtaggaacacctctcacggcttcaaatacgataacattgcctgtaaatgttacttctctgggaagttacacgattacgactaatacagttgatggaatttcttttagtggttccggaacttttacagcaactggaaatcaaaacattactttacaaggaacgggcacgcctacttctacttcggttaaaacaattaccataacttctgatagccaaggtggtgtatctacaacatgtacggtaagtgtagttgtagttataccaattaaaagattactcgcagtagggacttcagaaaatgtatatggttataattttgctggaatagcagcatctggaagaatgatttctacagcctcaaattttgggactacagcaacaagtgtagtaaaagcagaagggtttacaagaattaatggtggaaatagtcctagtattgctcagttgcaaggttggctttctggttcaagtcctgttgatattatggttataggatattcatgggcaccttctgatgctgaagcagatattattgcagattatttggtgaaaggaggagttgttttggcattcagtgaatccaatgcaggtatgcaaagactttttaggtatgtatttaatgataataccattacaacaggtggtgtaaatgcagccggtgctttgtacagacttcctgtaattaatgatgaaattataaacggaccttttggtgatgcaagaggcaagacttggggagaagatgcttcagcaactacttatgcatcaggtattccttccagcgaaatagatatatattctacagattctgatctatcacaggcttcacctggaggtacagcaggaagagtcactgcatttaagcataaaacactgaatttcatatggattggtgatggtggttttaattcaaattgtggtgcttctgatactatttgtccttttgaagtaaacggaagtaatttgcctgttgttaaaacttcttatggtagaggaggagatgcattagatcaggatgtttataattcaattatctctgcgaatgcttttgcatgggcaataaaacaagctgaatttaatggaataaatacacaataaagaatataatagtcacaattatatagtttttaaaggtcgcttctgcatcgttcatgttgcagaagcttttgttttgtagaaataataagcttaaatgaagccataattggaaatttgaaaacctgactcataaagatattggtttttaatcttgcattgaaactgaatccgtttaacaaaaaaagagtattcctcaggttttaaccctttcgaaatactctttcttaattttattgtaaacagaattaatcgaaattctgcagttctacaagtttgtgataaacacctttttttgcaataagatcatgatgcgttccctgttccacgatgtctcctttttccatcactacaatccagtctgccttctgaatggtggaaagtctgtgggcaataaccaaagacgttctgttttccatcattttttcaagcgcatcctgaacaaatctttccgactccgtgtctaaagcagaagttgcttcatccagaatcatgatcggtggatttttcagtacggctcttgcgatggaaaccctctgtttctgtcctcctgaaagctttcctccgtcatctccgatattagaatcatatccatccggaagatttgtaataaagttatctgcattggcaattttggctgctgcaattacctcttctcttgtggcttcaggtttccccataagaatattattgtacaccgtatcattaaataatacagattcctgggtaaccatcccgagaagcttacggtattcttttaaccttaaatttttaatatttaccccatcaatcagaatttccccttcggaaacatcataaaatcttgccagaagattcgcgatcgttgtttttccgcttccgctttgtccgacaagagctaccgtttttcctttaggaatacttaaagagaaatttttaagaatggcgtgttctttatcataataaaaaccgatatttttaaattcaatagctgtattaagtgttgaaatacttacaggatcagcaacttcttcaatttttacatcagcttcaagaatttccaaaaccctgtgcaaagaagcttctcctttctgtacgttggaaatcgactgcgataaactttttaccggaggcaaaatttggaagaacattcctaaaaaaaccagaaaatcctgtggcgcaatgctatgctccacaacgatctgtttcccgccataccatgcaatgattaagaaggtaacagaacccagaaattcgctgattggcgatgcgagttctttttttcttcccagtcgtatggaactgtcgatccatctttgcattgaacccataaaacggttatccatgatcttttctgcgctgaaaatcttaattacttttgaagactttaaagtttcatcaacaatagaaaatatcgttcccatttcattctgggcttcgtgagaatcttttttaaggctcttcccgattaacgcgattaaagttcccatcaccggtaaaaccagaagagaaaaaagcgttaattcagagcttaaaaggaaaagactgattaaggtactgatcaacataaacggtgcgttaatcagttccaccaaacttcctaaaatactgccttccacttcgcctacgtcattggacatacgcgacatcatatctccttttctgctttctgtaaaaaatgaaaccggcaaagacagcaccttacggtacatttctcctcgaagatctttggtaacgccaacacggtaattaatcagcaggaaagatcctaaatatctgaaaaggtttctcagcaaaaacataaatgctgtgatgacgcagagccatgccaaaacattcagcgtaccataatcatccaccaaagtctggatgtagtaattggaatagtttttcagatacggaaataaatctgtaagatttccggaatatacaggcggagattcaaaatcttcccttttaatagttccgaaaagcattcccaaaacaggaagaatggttcctaaagaagcaatctgaaatacagaatataataagttgaaaaataaacttccgaaaatatatttctggtgtggtttggcgaattttaatatttttttatattcgttcattcaatgaaaaaattggatagcaaaattacgtaattaaaatgataagacgtttttaatcgacttttactttataataagttgatgcaccacgtattttgttacagattttcgggcagatatttctcagaaaaaacaaagcaacccgaagaaaggtggctttagatatcgaattttaaaatttcactttatcgttatacttcggttcaaaattctttggtgaaagtttttctaaagtttttccgaaattattgatgatggtggttaaattctcgaaatccaccacatttacatcatcgttttcatgatgataatgcgtagctttcgtcatatctaccgtggaaaaagaatgggcaataattttcttttttacaaagcttacgttgtctgatcggtagaaaagctgttccgaagcataaggatcaggatttatttttaagccgtttgccgcatttttattaaacaattcatcaagatccgaaaattcatcacccgtcataaacaaagcgttttttccgaatgcagattctgttgccaccatttcaaaattaaacagcgcagtcattttatcataaatcggatttaaattctcgtcctttgaaatggctctggaacccagcattcctttttcctcaccgttaaatgccatgaagactaaagaaaactcaggttttttatttttgaaataatctgcaattcctaccagagtggtaattccgcttgcatcatcatctgcgccattgtaaatattgtctttaggattattgctggttccgatatgatcaaaatgtccggaaaatcctaagaatttttctgttttacccttttttacgccacaaacattataagctgtttttcctttgtattcaaaaggaacgagataagaatttccggtacagaaatctaaattgttttctttaaaaagttttgcgatataattggcggcgttatcattttcagcagttccgatttctctgcctttcatttcatcggaagccagagttgcaagcacagtttgcactctttccgtcgaaacttcctgcgcaaaagaaaatattgaaaagagcgagaaagtaagataagtaagttttttcatttttaataatttataaacaatctgtcgcaatataaacggaaatgttgcacggaaaatatattcagttgaaaaataataggaagacatctcctaaagacgaataattctgaaaatacacaaataaaaaaacagctcctaaaagaagctgttctcactcaaaaaatcgttgtaaggttatcgaagtctgtccacagattttacgagcctctcatcttttttgatgtaaatgtttgctataagcagacagatcaccgcaattaatgagaaaaccggctcaatacccttctcaggaaaatctattcctccggataattttagtaaccagtacatcaatacaccaatcaacaaagcgtttataataatgctgatgttattcagcagaatttgtctttttctgtttttaaagctgaaaatactgagtactcccaccaaaacaaggacaatacatccgatattaatcacaggaatgctgtctgaaattacaacatcttctcctgtaatgaacagaaacacagcagccaacactgctaaaaaagtccatatagtctgtattctttgtagcattgaatattaaattctacgcaaaagtaatataaattttgcacaattcaaaaataagtgtagatttgcattatacgaatgtacttgaaaacaacagtcacctgacttacttttcttattcacaattaattacattttttacactaaatatgtttaacattgaaacgttaaggtcgaaatccgtaacggaactgactaaaatcttaaaggatttgggcgttaaagtggcaagaaacagcactgaaaatgacaaaatctttgcaattcttgactttcaggcctccaatccaaaagtagcaaaagaatatttcaacgctactgaaatcagtacgaatactgaagaaaaaccggcagaaaaacctgcgaaggctcctgccagaaaagcggctccgaaaaaaacggcagcaaagacaaaagctgaagcgaaacctgccgaagaaacaaaacctaaagcagaagaaaaagcagaagtaaaagaacccatttctgaagaacaaaaatctgaagaaactaaagaggaacctgcagcagcaacagaagaacagactgcaacagcacaagctaagaaaaagaggaaaagagtttctcctgccagtacaaccaatgcagaagcacctcaggaaaaaacagaagctccaaaaaacacagaatctcaggaagctgctccggcagaagaaaagccgaataatacccctcaacagcaggccagatccccaaaaggacaaaacaacaatccgaacaacaacggaaaccagcatagaaatcaaaaccataaccaaaatcctaatcaacaccaaaaccagcatcagaataagcagcaacagcagcattctgagaaaactgaggaacagcacgaacagcctaaaaaggagttcagtttcgacggaatggtaagcattgaaggggttttggaaattttaccggacaactacggatttttacgttcttcagacttcagctatatctcttcaccggatgacgtatacgtttctaccgcacagatcagaaattacagtctgaaaacaggagataccgtaaaagggattgtaagattaccgaaagaaggagaaaagtatttttccttattaagacccacagaagttaacggacgtgatcttgctttcattaaagaccgtgtggcttttgaatatttaacgccgcttttcccacaggaaaaattcaatcttgccggaaaaggctctactatttctacaagagtggtggatcttttcgcacccatcgggaaaggacagagagcaatgatcgttgcacagccgaaaaccggtaaaaccatgttgctgaaagatattgccaattctatcgctgccaatcatcctgaagtttatatgatggttcttctgattgatgaacgtccggaagaagttaccgacatggaaagaagcgtaaatgcagaagttatagcatctacttttgatgaagcggcggaaaagcacgtaaaagtggctaaccttgttctggcgaaagcgcagagaatggtagaatgcggtcatgacgtagttattttattagactccatcacaagactggcaagagcttacaataccgttactcctgcttcaggaaaagttttatcgggaggtgttgatgcgaatgcactccataaaccgaaaagattcttcggagcggcaagaaagattgaaggaggaggttctctaacgatcatcgcaacagctcttatcgataccggttccaaaatggatgaggtaatctttgaagaatttaaaggaacaggaaacatggaacttcagttggatagaaaaattgccaacagaagaatttatcctgcaattgatttggtggcttcaagtacccgtagagacgatctgcttctggatgaagttacttcccagagaatgtggattcttagaaaatacctttctgaaatgaatccaatcgaagcaatggaatttgtagacaaaaacatcaaaggaactttgaataacgaagaattcctgatgtcgatgaataaataaattgaatttaatttgttaaatagaaagcacggacgtttaatgttcgtgcttttttagtttttggttagaagcgggacgtttttaatggctgtttttttgaaaataattattcttttgaagctttatctcgctttccgcactcgctattttaggatttcggcggcgaagccgccgccgaaatcctaaaatgagctcagacaattgctgcaatcgaggctagggtttttgtctgatatttcagtacatcattatatccacaaaatttaggatcctgaaagagttcaatatagcattaaaataaagtctgaaaaagttattatttaaaccctttggtttgttgtcaactttacaaaataaattttttcaaaattgataaacttccgtcattagactttcttaccatgaaaatttaattcattctaaatcaatatatcaatgttaaagatttattaaagtaatccccattttttgaatatagattaaataatggctaaatttgggtaataacattaaaaataaaattatgtcatttgaattaccaaaactaggatatgcttacgacgcattagagccgacaattgatgcaaaaacaatggaaatccaccatacaaaacatcatcaagcatacgtagacaatttaaataatgcgattaaaggaactgatcttgaaggaaaaactattgaagaaatctgccagacaggaactgataagccagcggtaagaaacaatggaggaggacactttaaccacaccttattctgggaaattttaactccgggaggaagcaaagaacctgtaggaaatgtaaaagctgctatcgaagcttacggaggtttcgaaaaattcaaaacagatttttctgatgctgctaaaacaagattcggttcaggatgggcttggttggtaaaaaatgctgacggttctgttatcgtttcttcaactccaaaccaggataacccgttaatgccggttgcagaagtaaaaggaactcctgttttaggacttgacgtttgggagcacgcttattatttaaattaccaaaacagaagacctgattatgtatctgcattctttgaagtggtaaactgggataaagtagaagaattattcaacaaataattttcaacgatttataaaaaagaaaggttcagaattgctctgaaccttttttaatatcttgtggcatcacttccggaaagtccgttcatttttaaaccgtatttccagtttacatacgcaaaaacctgatacaatttgtattcgaatttgataccgtatttttctttcggatcataatcaatcgaggattcgatgacgtttctgtaccttccggaattgtaatacgaattccattctgtgaccagaaaagtatttctgtttttcagataagattcagaatactggctgattggctttgcaaccgcattcagaaaataatcaaactgagtatcgattaccgtaagatcccattctccatcgtcattctttgatggtttcatttccgacttttctttttcatttttaacattgctctgcgcagaacaattgaaagaaaataaagaaagtattaacagcagaactaaatttttcatcttataaagttacaaaaaaaagacactcaatctgagtgtcttgtacttttatggttctttctggagaactacaaatgccggaaagtggtcgctgtaaccgccggtaaactggtcgccgttccatgatcggaaagggtagcctttgtaatttccttctttattcactaagtaagcaggagcaaaaatttcagccttataaaccgaataatcttttgttacctgatctgaaactaaatttttagaaacaataatctggtcaaataagttgggtgcatcctgatacgctaatgaagcaactccttttttgtataaagggtacattaagttaagataaggattggcgtcacttaaatctttcgggcttggctgtgctttaagatgattcttcaaacttgcacttacaggatcatcattgaaatctcccattgcaaataattttgttgatggatctgccgctcttacactgtccatttgctgtttcagtaaagctgctgctgcatttcttttaggaagagaaaccgcttcgccccctcttcttgaaggccagtgattcatgaagaatgccaccttttcattatcaaggaagcctgtaaccaccaaaatatctcttgtatattctctttttccttcgtcaccgaaaactttaagttccttttttaaagaattggttggagtaaatcttctcttctggtaaatcaaagccacatcaattcctctgtaatcataagaattgtaatgaatgattccgtaatcatattttttcagtgccggttcattaataagatcctgaataacctgtctgttttccacctcaattaaacctaccacagcaggagccgttttagtgtattgtgctcccatttcagaaattactttggcttcgttggcaagtttcgccttatacactttcgtattgtagtttttagcactttttggagtgaattcttcagaaccgccttggtatcttactacttttttaccgattaaagcgccatcgctccatggtccgtcgtatttttcagcttctaaaaacttaacggaatccaaaggaatacttctgtggaaagctggatttttaatatctttcgtcccgtcaatataatctgctgactgaatggtgtcccaaaggttttccacattcaaaaaacctacagtagccacctttctcagttttccctgctgttgtgaaaatgccattatcgaaaaaatgatggcaaaaaaactcaaaaatttcttcattctcttagagttattattaatattatttaatctgcaaatttacttttttttaacttcccgctattttaaatatttgtaaatttaaaatgtggtatttacgtttttatttataatgattcttaaaagcttgcaatgttaagaaaaaataacgtaaaaaaagttgtaaattctaaattttgactaaatttgcgtccccaacttttaaactgttgagaattaacaagaaaagtatttaaaaaaataaatatactcatgattaaaaaactatcattagtctctttatttactttacttccagcatcatactattttgcacagactacggtttctgcatatttaaaagatgctgaaggaaagcccgttgaaagggcagaagtagatcttaaagggaatgacaatgatgtaacggctgacaaaatcggatacttccagtttgtagaccttaagccggggcattaccaaattgtgattacaaaaccgaattacgaaaccaaagtaatggagtttgatgtaatggacagtgagaagaaaaaggatttagggacaattaccctatattctgcacttacaagcgcggatcaaggtttagcaatcattgacagtgatggagacgatgaggacagcaacagcggacaggcttctacagtgggtctactacagtcatctcaggatattttcagcagaatcgcagcgtttgatttaggattttattggttccgtccaagaggaatcgatggaagatttggagaaaccatgttaaatggtgtttccatgatcaagtctgataatggtaatgtagattttggaaactggggaggacttaacgaaattacaagataccctgaaatttcagcaaaccattcaccttcggaatatgcttttggtggaaacagctcggtagtttataaaaatactaaagcgagtgaatacagaaaaggatttcagtttactcagtctttaaccaacagaaattacagaaacagaacatctctacgttacagctcaggaatgagcaaaagcggatgggcgtttactgcaatgggagcaagaagatgggcggaagaaggtattcaggaaggaaccttctatgatgcttacggagcttatttgggaattgaaaagaaatttaacgataagcacacgatgactttcaactttatcggtgcgccttacagaagatctaccgcgagtccgagtactcaggaagtgtacaactacagaggagttcattacaattcttattggggatatcaggacggagagcagagaagtgaaagagtaagaaaaggtttccagccgatcttccagattcaggatttctggaaaattaataagaataatactctttggacatcagtatcttaccagttcggaaaagataaaggatcccgtttagactggcagaatgtacagaacccttctcctacatactacagaaatttaccaagttattacgattcattagatcctaatgcatctgtaacgcttccaacgggagtaacgggaacaacagctcaacaggcttttcaggcagctatgaacggatggacttcaaatgatccgaactttacacagcttaactgggacagattgtaccagagaaatatgcagcagcctgcaggaacttactatggacagaccggaaaaagagcattatattatttagtaaatgatgtaagcgacgataaaatctggaatgcatctactcactttgttcacaacttcaacgataatacgaaattcttattaaacgtatcttatcagaactaccgttctgagcagtacagagaagtaaatgatcttctgggtgctgattttgtactgaacagagatccgtttgcggcaacaaaccaacctggaaaatctggattatttaaccaaggtgaagaaaatgtaacgaagaaagtaggtgataaaatgacttacgactacattttcagaagacaggaagtgaaagtaaatccgggggtaagattcacagcgggagcttttgatgtatttgtatctgcattggcaggatattcttcttccagcagagaaggtttatttaaccactatttatacaaagattcttacggaaaaggaatggattataactactggaactacggtctgaaaggacaggttgtttacaggctgaatggtagaaacttctttgtatacaacggggcatactacaatcaggcaccttatctggaagatctatttgtaaatcctagagtaaacggatctgtagcacctaatgtgaagagcatgacggtaaatgcaaatgaccttagttatgttatttcttctcctttcttaaaattaagattaacaggatatttagtagatacagacaacgaaactacggttcagagattctttgcagatggtattccattaaacagtgtggatgcagacggtaaccagaccaatgttcagagtgctttcgtatctcaggtaatgacggatgttaagaaaagaaatatgggagttgaacttggagttgatgttaaggttttacctacattatcattgcaaggtttagcgagcattggacagtatacttataagaatgatccgagaacttattttgcatcagatgcagtaggcgtttttgcaaacggtcttccgtatgtagatcttggaaaatcatatattaacaattatcgtcagggaggaactcctcaacaggcttactcagtcggtttccgttacaacaatcctaaatattggtgggtaggtgccaactggaattattttgatgaaaattatctggatcctgctgcgttggtaagaacagaatctttcgttcagaataatgtttccggaacaccatattacggacttacggaaagtgacctgagaaaggtgcttgagcctaacagattaccttcatcattcttcctgaatgcaaatgcaggaaaatcttgggtgattggtaagtattatgttttaatttctgcaacagttaataatattttaaataacagaaaatacattaccggaggatttgaacagaccagaaatgcggtttatccaagtttctcagaagatttaagcagagaatatactttgtttgccccaaaatactggtacactcagggaagatcatattttgtaaatttacagtttagattctaataatcaattcactaattattctaaaaattaataaaatgacaataaagaaatacttaagtttagtagcaggagttgcattcgcagcaatttctattacatcttgtgttcagaaagacgagtgggatactccgccaattaagtgcgagaacagattccctgctcctaccatgactttggcagcattcaaagctcaggctccttctacaggatatgttttaatttcaactgatcagatttttgacggttatgtagtttcttcagacgaaaacggaaacttctataaaacaatttctttccaggataagccggaaaacccgactgcaggtttacaaattgaagtagacagatccagcaactatgcagatttcccggtaggtgcacacatcagaattaatgcaaaaggattaagattaggtttagacagaggtacggtgaaaatcggttctgtagatcctacttacgcaatcggaagagtgcctgcttctttgttaagcagatatgtttcaggagtttgtaacggaaacggtcttgaagtagttaccatcaagcctttggaattaccaaatcttgctgctgcaaagagtgatcagtacatcaatactttggtaaaagttcctaacacacagtttaccattgcagatatttatcctacagcaaaaacatttatcgattatgttgcaggtgcaggagtagatacagacagaactttggaagatgcatctggaaacagtgcagctttaagaaactcaggtttcttctccgaaggatctaaaacattacctacaggaaacggagatgttactttcgtagtaagccgttataattccacttggcagatgctgatcagaaataccaatgatatcaacttcaaagggacaagagtagatgcaacgccgccaaaaggaggaactgcaattacgtattcaggatctttccttgaaaactttgaaagctatgctaccactccggctaaccttgaagtgtatcctaaatatgtaaacgatccacttttaggaaacagatactggcaattaaagactttcagcggaaacaaatacatccaattgggagcgaattctggaacagggccttatgtaacatatttcgcagtacctgttgattttacagcagcaaacacactgaaatttgacgtaaacgtaggattttttaacggtaatgctttaaaagtgtattatactaccaattatactccgcttggagatattactcaagctacaaagacagatattacttctgcgtttacaattccggtaacacctacaagtggatacggaacaattgtacctgcaggaagttatagtttccctgcttctttaacgggtaacggatttgtattattcgaatacaccggaaacggaagtggtgttactacaacaatccagttggataacattcaggttcagtaataattctgaaaatttaaatcatataaagactgtctttttaggcagtctttttatttttgcccaaactcataaatcatgcagtattttgtttatgttttagaccacatttatacagatgaaacttatacagattttaaaagattaggttattttaacgatctaaagaacttgaagaagccaaaaacagagcagttcaattatcaggttttaaaatgcttccggaaagttttgtaattcggaaatatattttagataaagttaactggagggatggatttaccgaagttataggagagatcggacgagattatcctgaatctggagatgaggttgatgcaacaatagtatcggtaaaagagctgggattagaatcggttttttgtctgagtcatatttatacaattcatactcatctggatgatgaaagatatatcggcctattttcaagctatgaaaatgctcataatgtgatgaatgaattaaaggataaatcgggttttaaagattttccagataattttattctggaagaggtaatattgaatgcaatgcattggacaaccggattttattgagaagattaaaatcagatgcagctccaacaaaaaaccaccgcaaaagcagtggttttattattaattgtattatctttaaaaagatacttcatttacctcttttccgcgctggaaattcattgttttctggcttcctttataagcaatattcacaaggttaatctgcttaggaaaggcgcttaaaaggatcgtattttttattcttaaggtactgatgtcggaaacgcctcccgtctcaaaatatacccatactgtttctccgcttacctgacttcctgtaaatgtaattgttttgggtgagccattgacatacacatcaaaattattgtttacatactttttaacttctgcctcaaatcctgccgtgttcgggttaatttttatagcatcggaaatatgatttgtattcatttttgtagtgaacttcaacgttttgcttccatcaatataatccaccttggtcattgaagagaaaaagtctacatacgtgaaactcattaacacaaaaaatgttaaaattcctgatatatataaaatttttttcatcttagataatagatttacaatcatgattgttagttttaagtcacaaataatgtgccaattaaaagttcacgtttacggaatatttatcataaaaagctttgatgtgcgctaccgcttcatctgcggtgtctaccacacggtaaagttccagatcttcttcgtggatcatcttttctttaagcaatgtagttttaaaccagtctaataatccgctccagaattccgaccctaccaaaacaatagggaatcttcctattttgttggtttgaatcagcgttaaagcttccgtaagttcatctaatgtaccaaatcctcccggcataaccacaaatccctgcgaatattttacaaacattacttttcttacaaaaaagtaatcaaaattcatcgaatacgatttattgatgtaagggttgaaatgctgctcaaaaggcagatcgatattcaaaccgatggattttccctgtgcattaaaagcacctttatttccggcttccataattccgggacctcctccggtaatgattccgaagcctaattttgtaattttctccgcaatttccaccgccattttgtagtatttgctttgcggcttcagtcttgcagatccaaaaatagaaacacacggaccaattttagccagtttttcatagccatctacaaattccgccattaccttaaaaaccatccaactgtctttcgtaatggtttcgtcccaggttttttgtcgcagactgttttgtaatcttgtttcgttactatcaaattcaggatttaccaagctttcatccctcgttccttcaattcccattgtacaattatttaaagtgtttttcggcttccgttacagattccggtcttccgacatcaattaaaatgctgtcgtgaaggaagccatgaatatgctccgtctgcataagatccagatactcttccataacagaaaatttgcctgtcctttttattttttcaaagataagcggattgatgcaatgaaccccactaaaagccaaagctttgaatcctttgttgaattctgcaagtctctgttctccggtctgtacattcagccagcctcttaaaaccatatcatcgttaaaaagcagttttctggagctttctctgtccgatacggctaaagtagcaaaatcttttatctttttatgatattctactaattccgtaatattaatgttggtaagaatatcggcattcatgatgaggaaatcttctccgtgatcgagaaattttctagcaaaaaccaagccgcctccggtttccagaagctcttcactttcatcggagatttctattttacatccgaaattatcgttctgctttaaaaaatcaactatttgatttccaaaatgatgaatgtttatgacaaaatcgtttattccgaaattttttaaatatttaatatttctttccagaagcggaacttcattcacctttgccaaagctttcggatgatggtcggtgaatggtttcagtcgggttccttttccggctgcgaaaataagtgccttcattttttatgggtaatgagtaattggtaatgagtaataaaatgatcgtgtaaaaattaaaaacaataagtagtaaaatatcaacgaatttaaaaatattacttattgcacattactcattacttatgattaagttgatgctgttcgtcgtgatgaaggttgatttccactttctcgccatatttttcttcaataaaatgagcgatttttatcgcagaataaaccgatctgtgctgtcctcctgtacagccgaagttgatctgaaggttttcaaatcccctttccagataattgtctatattaatggaaacaagcttcttgattaattccagaaattttggcatttcggttttggtttccagatattcctgaacgccgatgtcgtttccggtctgggttttatattcttccactcttcccggatttaaaattccacggcagtcaaatgtaaaacctcctccgtttcctgtttcatctttcggaattcctccttttttgtacgaaaaactgtgtatgtcgatgtgtagcatttttttaattttataattatttattcttaaaccgttaagatttatatttaagaagttaagtttatttaagatttttgataaatcaaaattttagtttgggagctctttaaaatactcattaataaaaggttttaaagatttggttatgttatcggtgaagaaattgattaacagaccttgaggctttttcaaaactttcatgtaagttaataattgagcttcatggataggcaaaatttcttcgatcgcttttaattctacgataacagcatcatttacgagcagatcaacaaccagttttgttttaatatcaacaccttcataattaatggttgtataaagttgttgttttacatcatatccattgttaatgagttcaatttttaaacattcttcataaatactttcaagcaaacctggtccaagtgttttgtgaacttttattgcaaaaccggtaatttcataagacaattgtgtgatttcttttttcgtcataacacttaacgatgcttaacttcttaaatataaatcttaatggtttaatatttcttcaattttcaattttgttttatctgaatttaattgattaatcactttttccagttctggataatcttttatattttcccagttttgcgcaaatgcagtaatatttttgattcctttttctatgcttgaaataaaatgcggttttctctgaattaatccccggaaaccgtaagctcccaaaacctgaagaaaccgcatcagttgaattggttttgccgaaaaatttagttgatttttaatatcctgattttcaaattgatttgtataaaaattcaacatctcatttttaaaatcttccggaaagtttgcttttgcctgaaacagaaaagaaatcacatcatacatcaaaggacctttcattgccgattgatagtcgataaacgagacttcattctgatcattcaccatgatatttcttgcctgaaaatcgcggatcattaatcctttgggttccagattttcgataaggctgacaatttttttaaattctttcagaagggtagatttgtgatattccagctccagaacatccgccacgaaatttttaaaataatacagatcgtgcattaccggaagttcatcatagctctcatattcgaaagtttttgtgaaatctattttattctgcgttgaaatctgtaactgatacagtttttgcagggtttgctttaccaaagattttacatgttcagataaaccttcttttgagatgatttcagaaagagtatggtctcctaaaaactcctgaatatagattttacggtcatccgaaacggcaaaaattttaggcgtattaagctttaaatctgaaaataggtctgagtaatacaaaaaactttcattttccgcgatgttttcgttgtaggtaataatatactttttatcagttttcgcaataaaatttactctcgcggaaccactttgagctaaagtgatcaactcagaaggttgttttccagtataattttcaaaaaaaatttgggcgtattcggaaatcatagatgtcacaaatataataatttacaggctaatttctatatttgcattatgctaaaggattttaaacctgttttgggcattctgctgcgcttcatcatcatttatctggtgctgctttttgcgtatcagttttttctgaacagttttcagaaagaaggtcttgatcccttttcgagaatgattgcagagcaggtgagggatatccagaactttatgggtttttcaacacaactgtatgatgatgttaaaggcgaacaggtgtatttttatgtcaggaacgaatatcctacaagaatggtggaaggctgcaatgccgtttctgtgatgattctttttgtggcatttgtttttgccttttacaaaggaaaaaagacctttgtttttgtagttctgggactggctttgatttatattattaatgttttaagaataattgggttgaacattgtgattcttaattacgaggaatacggcaaaatagctcatgattatatttttccggcggttatatatgggacagtcgtgttactttggctaatctggataaaattttttgctttaaaacatgaaaaatcttaactgggttttagtcatattgggaattttaggtcttgtaagtgtaagaatacttgaagacagaattttttatgatccatttctcaattatttccatgaagccaataaaaatattccttttccctcttttgaatggggaaagctgattttgggctatattttccgttttgttctgaatctcttattttcatgtatagtaattcatttctggttcaaaaacagacaatggacgtttcagggagctattttaattacgattatttttgcgattacttttccgatttatttatactgtatttatgacaggtttgaaatcgggtatcttttttctttttacatgagaaggtttgtcattcagcctttgattttacttctgattatcccaatgttttattacaggaagcaaatcagtcaataaaatttttagaagttatgttttaattgtcttcaatggaatgcttatccacagaagtcacattttccggagtccaaaccactctttttacaaaatctttttcgcggacagggcaatttgatatctgacaaacggaacaggagaagggtttacagtcatccatatggaaattaaattccaccgttctttttgtattttttgccaaaaggatgatcattttttccatttcattgtgtgcatcacgaaggctgtaataccaaggtagcgtaatatgtgcatcaatatgaagatgggctccgaattgctgaattttcatattatgaacatcaatccattctttttttcggttttcttctaaaatctgtatgatttgttccagaaggtcgggatcctgttcgtccataattccacttaacgatttgcggactattttgtatcccactacaataatgtacactccaaaacctaaggcaacaacggaatccagccagtaaattctggtaaaatataccacaattaaactcacaacaacaccaagtgttgttatagtgtcggattgcaggtgttttccggatgaaataagaacgatagaattttcggcttttcctttttgaatagagatatagcccagtaaatagttgataacagcagtggcagcaataatccagattccgatatctaatttacttaaaacctttcctacaattaagctgttaatgccttcgtagataatcataattcccgcaatggcaattaaagcaccttcgattcctgaggttacgaattctacttttccgtgtccgtaaggatgatcctcatctttaggttttgccgcgagatacagtgaataaagccccataaaggcactgatgacatttacaatactttccatggcatcagaaaaaacagcgtcggaattcgtcagtttccaggcgataatttttccgataaagagaataactccgaaaacggctataagtttctgaaaggctaatttatctttacttttattcttctgaacgatcataggtttgataaaaaaaagaatctcaattctgagactctttttatgtttgttagtttatactaagttattttctacaaggtattctgcaatctgtaccgcgttcgttgcggctccttttcgcagattgtctgccacgatccagagattcagagttttgggctgcgaaaggtctcttcttatccttcctacgaagacttcgtcttttccttccgagtacagcggcatcggatattcgttgtttttcacgttatctaccactacaactccgggagtttctgataagatttttcttacttcgtcaagatcaaattcattttcaaactcgatgtttacactttcagaatgtcctccctgaaccggaactcttactgcggttgcggttaaattaaaggtatcgtcccctaaaattttcttaggttctttcattaatttaatctcttctttcgtgtaatcgtcgtctgcaaaaacatcacagtgcggcaatgcatttttgaagatctgataaggatatacttttgcaatagaatcgtctccgctgatttctccgtttaactgatctacagcagctttaccggttcctgttacggattggtaggtagaaacaattactctttttaaatcgtattttttgttcagaggtcctaaaaccattactaactgaatagtggaacagttcggatttgcaataattttgtcttctttcgtcaatacatctgcattgatttccggaaccaccagttttttatcaggatccattctccatgctgaagaattgtcgattactgttgtccctgcttctgcaaaaagaggagcgaattcaagagaagttccgcctccggcagaaaaaatagcaatatccggtttggcagctatagcgtctttcatgcttacaatcgtaaattcttcctgtttatacttcaccttattacctacagatttttcggatgctaccggaattagttcggtgatagggaagtttctctcttcgagaactttaagcataacttgtccaaccattcctgttgaacctactacagctactttcattgatttaattaaaaattattttgttaatatatttatgccccgaagactctcgcccatgggaacgcgaatgcaaataaacctacggcaattaatcccataattacgactcctaaagaaatcgtagggtttgtttttacttttttgttaacgatcgtcattaaaacagcggcgatcagcatagaaaacggatgttctacgtattgaaatcttaatgctgagtttttcatcacttcacccatatttaaaccattagagaaattgataatcagcattaccaatcccaataagaattgaacatggaaaaagatcatcgtgaaaagagtggtcttcttaaggaagttatttacttttccactgaatccgaacatggttgctaaaagtgcaataacaaacagcgtcaccaaaagaatttccagatatccgaatcctttgtgagcattaagtaaaatgttgtaaaagtccatatttatttttttctgtttttcagacacaaatatagcaaaaatcccggcgaaaagccgggattgatatttataaaatctaatttatgtatttattagaagttgaaagaaagggttgcagaccatgttcttccgtatccgaaataaacctggttttgttggcttactccattccatgttcctgctgcctgatacgcctgatagttagacgttaatgttgcaatttgagcagtggttaatggtgttgactgtaaaggtttatttactgcaatatactgatctaaagttaatccggttttgatgtttgtattagattctgcaatgtaagtcttatccagcaagttataaacattacctctaatcgtaaagaattgtttaggattgtttaatttgattttaaaagatattcctaaatcaactaaaccataagaaggcaattctaaagcaccttggtttcctgcatccggattggagaagttaagaaggtttaagttagcatataaatttttaattcctctatatgttccgtcgaatgagaaccagtctgttggcttgaatgtaaatccaactgctgctgaagtttgtgctgctccaccaactttaactttatctatgtaaagagtttgagtatctgcactgatcagttcatttgtttcgctaaagatatttccttgtgcatttcctttgtagtaccagtctcccacagaaagcataccgtacaggcttaacattttgtgaacattagcatttgcttcaatttcaaatccctggtgaatttctgtaattccctgaaggtttgaataagcagtcgttgttgaaattgttgaacttggattagccggatcaggataagtataagatagattacctcttcttaagaatctgtctctccactcagttctgtaaaggttcaaattagctgtgaagataccagaacggaatccatatcctgcctcaacaccgaagattttttcattcgttaagttcggatttaagtagtttttgttatttgggtaaacagcattaaggaaaggctgcttagaataatatccgatatttacaaaaacgttgtgctgatcattaatgttataattagcacctgcctttacattatatcctacaatatctttaaagcctgttttttcatacaataatggatttgtagcggttggctgagcaatagcggtagatgttgctgagtttctgaaacctgcttgctgaccatttaaaagggtaactccatcgatgataaagtgatcgattctctggaatgactggttagataatgcccctgaaacaaatgcagataatttatcgttagagtactctaattgaccaaatcctccataccatagaacttcaccatcattgttatatcctaccatatcatccatgctgtttctttttcctccgaacggattgaaagtaggttcagctttaaatgtattggaaactactcttggagttacagtatatagatttcctggagcagtgtaaaagtttttattcgtattatctttgtatcctgctgccccataaagatcagaaagtacctgataatgatatccgtaataatatctgtcgtctgtaccaattgtgaagtttaagttatcattaattttatgattaaaactaataattgctccaaaccagttatgagagttgatagatgatcttcttactaaagtgctacctgctgctgcagtgtttaaattaacatttgcgtttgtagcaaaaattctgtcataggcaatttgtccgtttgcatcaacgaaagagtttacccctcctgttgcagtacctacacctgttgagattctacctaaatctccagttcctccacctctaccgaaagaagcatagaatactgaatttaatttagattttgaactgatattccaatcccagtttaatgacattactggtttgtgatagtagtttactctgtttgataaaacttcaccgtttctccatccccagtctgcgttgtatcttctgttaggagttccgtcattatcagaattatatttaatgtaattttgaatagtagaataggttgttctctgattgtgccattgaggagctcccgtaatggtaaactggaaatcatgttttttatttggctgatatcctaaggcaaaataatagttatagccttcgaactcagttccgtctgcgtacattgatccggcagttctgctcattaagaatgaagaagaccatccttttgcagatttacctgtattgtatgcaaataaagtttttaaataatcattattaccaagacccaaagaaacagttcctccctgttttttatcagcagctcttgttaatacgttaattgtacctccaacagaagcaatggctaattttgaagatccaagacctctttgtacctgcattgcagaagttacatcagaaagtccagaccagttagaccaataaacagctccgttttccatatcattcacgggaacaccatttaccattacagcaatgttttcctgtgcgaatcctctaatgttaattttagagtctccaaaacctccaccggcttttgtagcatatacagatggggttgtatttaagatttcagggaattcctgatttcctaatctttcaacgatttgcgcttctttgattgttgaaactgctacaggagtttttctatcttttgcgatatcagcaactccaattaacactacctcgtcaatgtctttagaccttgtatcttttacagtgtccttaacctgttgagcataataaacgctagctgtggataatgtaattatcgcagttagcattgatttgttgattaatttcataatcgttagtaatagttagatttaattttctgcaaaattgaggaaatttattttaactaatattaactgtatgttaatttttaaaggttcttaataaggtttaaaatactgatttacaatgtattgaataataattgagatttcgcatgaaaaaaatcacattattgaatttttaacaaattggcatcatttttaataaaaattcaatgctatttcacggctttgaggcttaaatccatattttctgctgagtgggtaagtgcccctgcagagatgtaggtaacgcctgtagacgcgatttctttaagctggtcacgggtaattccgcctgaagcttcactttcacaggaaccgttaattagctttactgctttcttcatagtttttacatccatgttgtcgagcatgattctgtctacctttgcatcaatagcttcctgaacttcttccagatttctggtttcaacttctatttttagttttttcttgttctttttgatgtaatcttttgccatttttacggcattcgtaatgcttccgttataatcaatatggttatctttcagcatgatcatgtcataaagaccgtatcggtgattggttccgccgccaatagcaactgcccatttttcgcataccctgaaattaggagttgtttttctggtgtccagaagttttgttttggttccgatgagtctggaatcccagtcatgcgttaatgttgcaattccgctcattcgctgcatgcagtttaaaaccagtctttccgttgaaaggattgatcttgcgcttccggttacgataaaagcaatatccccaaattttactgcatcgccatcttttacgaaagtttcaacttttaagtttttatcaaaagttttaaaaataatttcagcgagttctactccggcaagaatgcaatcctgttttaccagtagttttgcactttgctccagatctttagggatagtggaaagcgtagaatggtcgccatcctgaatgtcttcttcaagagcgcttttaataaactgttttaaaactttatctgtaacgtatgctggtcttttcatgagtctaatttttttaattcattttccacttcttcaattgacggaaggtgagatttgaaattttcgggtaatatttttttgagttcataagacgaaattcctaacggtttatgaagatctgtaagagaatattctgcaataatttcgtttttgtctttgcagataatcattcctacagttgcattgtcgttttcatctcttagttttttgtcgacagcagttacataaaaatttaacttgccggcaaactccggttcaaaatgtcctgttttcaattcgattacaatatacctttttaatttaatatgataaaaaagtaaatctataaagaaggattggttgccaacagaaatttcaacctgctttccgacaaaagcaaatccgcttcctaattctattaaaaattttgaaatattttcggttaatgccttttccagttctctctctttatgattttctgtaatgtttataaaatcaaaaatataaggatctttgaatgtttcacggaccagttcactgtcgtaatcaggaagtgtttttgaaaaattattaattgtttttccttggctttcaaatagtttcccagaaatcatgttaattaaaatagcacgactccagccattttctattgtcttcccgatataaaaatgagtttctgcctgagttttacattttgtgattaagacaatatgatgtccccagggaatgaggaaaatatgatgcatcaaatcgtcaacaacttgttgacgatttttatctgtttgattataaaattgatagaatcttttacaatatttcaaattgctttcggaaagtcctttgatttcagggaattctgtgcgtaaatccttacttaattgtaaaaaaaagccggagccataagtattttcaaaatttcgttcagagatttcttttcccaaatcccaatacatttctatcaaagcggaattcacctgaatggctgctttgatctggctttgctgaattttttgttttaaatttaaaatccagccaatatattgttcattgttcttatttagcataacagaaaaatatagcttatgcctgagctaaatctttattataaaacgcacctttattctccgtcatttccatagactgcgtaatgatgaggtgggcaacggttgttaaatttctaagctctgataactgtggcgaaagaatagagtagtgataaatttcgttcactgcggcagcaatttcctgatgtttttgcaaagccatattcagacggcggttgctgcgtacaattcctacaagatcactcatcatttcctgaagctgttttctcaggtaagaaacgatcaccatttcgtccataattttcattccttcttcattccactccggaacagctttcagatcatcgaagttgaaattattttcatttaaaagttcaacggttttcattgcggcattatgtccgaaaaccagtccttccagtaatgaattggaagccagtctgttcgctccgtgaagtccggaattggtacattctcccactccgaaaagatttcggatagaagactgtccgtcacggtcaacttcaattccgcccatcagataatgacaagcaggaactacaggaatgagttgactgaaaggatcaattccttcgtctttgcattttttataaatattcgggaaatgttcaagaaatttttcatgatccatttcacggcaatccagtcctacaaattcgtctccggtaattttcatttccgcatcgatagctctggcaacaatgtctctggaagcaagctcttcacgctcatcatatttgtgcataaatttttcgcctcttttggttcttaatttcgctccgtcaccacgaacggcttccgaaattaaaaacaacattccgtcgagcttgctgtacagcgcggttgggtgaaactgatagtactgcatattggaaacctttccttttgctcttgccacaaaagcgattccgtctccggtcgcgatcgtcgggtttgtggtgtttttgtacacatgaccagctcctccggtagcaacaagagttatttttgaggtgatttttttaatggttttggatttttcatccagaatataagctccgtagcaatggatatcgccttcattcagttcttttcctggaacgtgatgctgcgtaatgatatcaatcacgtaatgatgatcgagaatttcaatattcggactgctttttgcggtttgcaaaagtgccctttcgatttcaaaacctgtgatatctttgtgatgtacaattcggttttcggtatgtcctccttctcttcctaaagcaaattcgccgttttttttgtcaaaatttgccccccattctacaatttcgttgaatcttgcaggtgcttcggtaaccaccatttctacgacatcgcgtttgttttcgccgtctccggcacgcatcgtatcagcaatatgtttttcgaagttatcatttttagaatctgtaaccaccgcaagaccgccttgtgcatatttggtattgctttcatcttcgtccgattttgttacgatgattattttggcatcaggaagctgctcagaaatttttatggcataggagagtcccgaaattccggaaccgattaccagtacatccgcttttatcatatccttagtttaagacaattgtctaaatggttaaataaatttaaacaatttttcgtttggttttcttacttttttcatgtgctggaaatgatcttcctccgaacgatatcccaaagcgagggttacacttactttttcggtatcaggatttatctccagaatttcttctataagttcctgtcggaagccttccatggggcaagtatctatattttctatcgctgctgcatacatgagatttgccagaacgatgtaagactgtttttctgcccagttgaaaatttcatcctgtgttttttggttaatatgctgattgatgctgtttttaaaaagatccagtttctctaatggagtttcgcgcactttagaaatgtggcggaaatatccgttgatgtaattgtcgtccacgatttttttggaaacgataacaatgagatgagaacaggtggaaatctgtgacggattgtagaacgccggaattaatttctgcttcatttcctcactttccacaataaggatttcgtaaggctgaagaccaagagagcttgccgataattttccggattcaagaatattatgcaaaatttcctgaggaataatttcttgattaaatttttttacagaatatcttctgcttaaagcctctaaataattcataattcaaatttaagaattgaatgcgaattaaataagtttaaaataaaatttttcttctaaataaggcataaaaaaagatcatccgttttcggatgatctttaagagaagtgttattctatattttttacgagtacccagccattgtaagaggtctgagtattgtttttgtcattttcattccaggtgatggtgtaccagtaagttcctgtcattacttttttaccacctgtagttccgtcccatttgtagtttcggatcttgtcggcttcgtacattttatttccgtatctgtcatataccgtgaacaccaaattctttttatatgctagtgcggaataatcaatgaaatcatttttattatctccattcggagtaatggcattcaggagattcggaactgtaatctgaacttgaattggagtacaattgtatgcatcttttacatatacgaccgcttcacctcttgcaagacctgtaaagacattagaatcctgccagtttatcccgtctaaagagtattgatacggtgtttttccacctttcacattcacagttatcgtgttgttcttaatatcaatcgttgcaattacgggttgttgcgaaggatttacccttacggtctgctgtgttgtacatcttcctgatttaagctgtacccaataaattccgggcgtcacattcgtgatagattgtgtggttgctccggtgctccataagtaactgtcgaatccggttcctgcatctaaagttgttttggcatcaatacagatgattttgtcttttaatacggaagaataaataggcgctaaaacttttaatgtaatttttgcaagagtccagcaattggtcacattcgtaattcttacatacactacggatgatgtgcttacgtaagctgcaggattcagaatttcatttgttccggctaaagcatccgcttgtgttttaaaatatcttttggtaactcccgtcgcagaagttacaattgcctgtgtaagattaaataaacccgttgtcggtgcgttatcaataaaacaagattctaaagtgacgtctgtagtgacaatctgtggataaaacgccaaagtaattgcagcggaaccctgacagccaagcggagttgttacttttacatatacggttcctgctgcagaagtataagcggtaggattcgtaatttcattcgttcctgcgttcagatctgccatatttttataatacttcttggtagaacctgtaggttcatttacattggcaagcgtaagattgtaggttgctgttcctgtattgttgttattgcattccgtaagcgttgcaggggttgctgtgaatggagaaagatttaactgaatttttccgtccggattatcacaaagcaatcctgtattgtctttaattaaaacggaaactgaagtatttgcactgaactgatagttggtaggatttgtaatcggagttccgcctacactgtacgagaacgtataattggcaggattggttacaaactgtccctgataagatgttaaatttaccgttccttgtcctgttgcaggattcggacagaaagtatccgtaaccaaagtttggttaagggctactttatcaatataaacttttacgtttttaatagattgtcttgcgcttgctcctcctgtagaagcagaaaatccgaaataaccggtcgtcatggtagcagccgctccggaaggggcaaaagactggcttacaatcgtagttccgtcgattttaagcgtaatgatccagcttgcaggagccgcaggatttacctgtccgtttacttcaacgtgtctgaaagtatttcctacaaaaggctgggtaggattaagatccggagagtgaaatgtacttccggcagtgttgttgtattcgatgtttgatcctgttgtgttattggttccatataaaatatgaaccttgctcatctgtgcttctgtggtattattaaagatgtcaaaacctaccattaatccggtagagtttgcaggaattcccaatcctccgccagaggtgtaagaagcgggtggatttgccagataccaaaaagcaataccgtctcctcttccgtaagccgttgttccgtttccgtcgattctgaaatcaaattccactctccatttatcgcagtattttagattgatgggagagtctaatttaatgcctcctacctgactgatctggtctgcggtaagctggatgaagtctgtatttacaacagcggcaggaacgatattccagcctgttgtgtttacgggatttccggtaagctgataggtttgcgacgaaatttttccgaagcagcaaaataagaagagggataaatacaggagtaaatttttattcatttattagtatacttaaaattagacgtgtaaatatattaaatcctgattaaataatatgtatttaatattaaatttaccttatttagtatttattttgtaataaatgataataaaaatgaaagaatactgaaaagtgtttttccgaatcttgtaattttagattaaaacaaagtgttattttcgagattttcgaagaaggaatcgacctctaaattttcagaggcagcagcggttacggcaagtttgtcgcataattcgttttcaaaatgtcctgcatggccttttatccagtgcattttaggcttgtgtatattataaagtgccacaaatttttgccacagatcgggattttttacatttttccaccctcttttgatccatccggataaccagttctggtttatggcatccgaaacatatttactgtctgtgtaaatatgaatttcgttgtcaggagatttcagtttttccaaagccgtaattacagctagaagttccatcctgttgttggtggttttccggaagcctttggaaaatgttttctgataatttttttcagggacacgcatgagaattccgtaaccgccttttccgggatttccgctgcacgctccgtcggtgtatatttcaattttcatttttaaatcttgccctgaatttaaaaaggaaaatcgtcatcatcatcaaaatcattcattgaagatcctgaaagttttgaactgtcgggaagatcaaatgccgcacccggctgaatggttgttttaattttatcaaaaccgctcggttcaggctttccgaagctcgatggatatcctcctccgctcattcctccgtcaaaagcagcttcaatatcaccgaatttcgcaaaatgttttaagaaagataaacgcacatcggcagttgcaccgtttctgtgttttgcaataatcaattccgcctgattttctgttgaggtttcctgtccttcttcatcgttatcccaaaccgtaattttataatactccggtctgaaaataaaagatacaatatccgcatcctgttcaattgctccggattcccttagatcggaaagctgaggtctttttcccggacgtgtctccacacttcgcgaaagctgcgaaagtgcaataaccggaacgttcagttctttggcgatcgcttttaaggatcgtgaaatcatggaaatttcctgttcacggtttccgcctcctttaccgccgcttccggcagtcatcaactgaagataatcgaccatgatgagccttacgccatgctgcatgacaagtcttcggcattttgcacggaaatcgaaaatggaaagtgatggtgtttcgtcaatatataatggtgcgttttccagttcagaaacattggagaacagtctttcccactcttcatcatcaagcgttccttttcggagtttttctgatgaaattcttgtttcggaagcaatcatccttgtgataagctgtaccgatgccatctcaagcgaaaacaaagccataggaattttgtgtcccactgcaatatttcttgccattgatagaagaaaagctgttttccccatcgccggacgtgctgcaataataataaggtcggagttttgccatcctcccgtttctttatccacatcgcgaaaaccggaaggaactccggaaagtccttctttgtcttttaaagatttaatggtatcgattgcctgttttaccaatgaattggcggtatcgaatccttttttaatggttccgtttgtgatctcgaaaaaagactgttcggctttatccagaagttcaaaaacgtcggtagattctttataggaagcatcaattacgtttgccgaaacattaattaggcttcgaagaatatatttttcaagaataacacggacgtggtattcaatgtgagcagaagagcttactcccattgtaagatcgatgatgtagctgtctccgccggcagagcttaactttccttcttttttaagctcctgaataatcgtcattaaatcgacaggctggttgccttcgtataattttaaaatggtagaaaatataacctgatgtctcggatcgtagaaaacttcaggggtaagcaaatcaatggaatgatcaagcccttttttatcaattaaaaaagtaccaatcaccagtctttcaaaatccaatgcattgggaggcattttcccgtctgcaatggagagttcttttgcaaaatttccgttcgtcaaagaagataatgtttctttctgcgccataatagtgcaaagatagtttttttgaaaagcaaatgaaacggagtaactaacaaaaaattgtggataacttttgaaaccgttattcagaaaggctttgcagagagaataaaaaaatcaccccaaaaatgaggtgatttaatgttttgaaaatcagattaaatgattactggatgttttttaccaatacccaaccgctgtatttcgtttgtgtattatccttatcattttctgtccacgttatcgtgtaccaatacgttcctgtaacgattttcttgccaccggaagttccgtcccatgtgtaatttctgatcttgtctgctttataaatcatgtttccgtatcggtcgaaaaccgtgaaaactaaatcttttttatatgctaaagcagaataatcgatataatcgtttttgttatctccgtttggcgtaatggcattcagaagattcggaacagttacctgaacgctaattggattacagtcgtaagcatcttttacatatgctttgttttcacctctcggaagacctgtgaaaacattggaatcctgccagtttactccgtcgatggaatatttataaggggcttttcctcctgttgcattaattgtaaatgaatcattgttgatgtctatacttgtgattacaggttgtactgaagcggtaaccttcacctgctgtaatgtccagcattttcctgttttcagttttaccgtgtagattcctgcagaaacattggatatcgactgagtggttgctccggtgctccattcataggcatcaaaaccaggtcctgcgtctaacgttgttttatcttctatacagatgatcttgtctttaagaacagatgatttaacaggaggtaaaactttcaggttgatttttgcaatggcataacagttttctatgctgattacttttacataaactacggctgttgttgaaatatatgttgtaggatttaaaatttcattaattcctgcaatagcatctgcctgagttttgtaatatctcttggtgtgtcctgtctgtgtcgttacacttggtacagttaaattaaatgaagctgttgttacattagattcaatgtagcattcttcaatagaagcatcatttaccgttactaccggattaaactgtaaactaatctggttatatcctgtacatccctgaggatttctcactcttacatatactgttttcggagcggtagaggtgtaagttgcagggttggtaatttcattggttcctgcattaaggtctgctaaagtaggatagtactttttcgttacgtttgtagaggtaggataaacatcaggagccgtaagatcaaaaacacctgttccagcattgttgttgttacaagcttttacagtagccggaactacagcaagtgctggtaagaactgcaaagttatttctgcatttgcagtacatccttcattggttgtaatttttacaaagacagttttaggagcttgagatgcataagaagacggaattgttatttcattggttcctgccgtaagatccgccattgtaggataatattttttcacaacattggtcggtccgtatacgtttgcggaatttaaatcgaaataaccgattcctgtattgtcgtagttacaagaagtaatcgtagcattatttacaacaatattacctgatctgaatttgaatttcccaacctgaaaacatccgtttatcgggttattcgggttattcggatctacatatttaagtctgtaatagtaaatagtggtagcatttaccatgatcggcgttgtaataggtgccgttcctgtaatcgcatcattacttgttaaatgataagttaccgtgaagtttggattaccattgataattcctgtagacaatgtgctgaaatcgaacatagacggtaaagcacattttaaaatttcgttaggatctgccggatttgcagcaggtgttcccggtgtaataaatggatttggcgttaacgcagggttgttgaatgcagaagttaaagaagcagttcctccccacgttaaagaaaatccatacggattactcggaatataattatcaataagaagataataagtttctccggcagttacatttagcggagtttcccactggcttcctgttattgttgaacttagacctgtgggaccactggttccggaaaagttacatttaatagcatttccaaaatcccatgtcgcacaattgatgttggggccgtaaaccgcaaaatcataatcataatgcgttacacccggaacggtatttggggtgatggtgaattctatagtacctgttgtggcagcggtaaaaacataccatacagaataatgctcatcggcaagacagcttcctgaagtagcttcctgaacggttcctgaactacttggattataagaaatgtcggaatttccacaaaccggaattgccgaaatacaatctgattgcgagaaaaccatttgcgacaaaaataaaatagtcagcagtaataatttcttcattagaaagattttaaaaatatattagactttatgatgtgaaaaaaaccgctttttccaagcggttttttatttaatttatggtgtttattctctgtttttaaccatcacccatcctgagaatttgaatggtgtatttttcttgtcattctctttccattctacggtataccaataagttccggtaggtatttttttaccattggtagttccgtcccatttgtatccgttggatttatcagcctggccaacttttactccgtatctgtcgaaaatgcttagaacaagaccttgttttcctgctaaagcagaatagtcgatcacatcatttacaccgtctccgtttggagtaatcacgttgattaggtttggaacaactacagttaccgtaagaggatcacaatcgtaaccatcttttacataaacggtattgtctcctctggcaacattttcaaaaacgtttgaatcctgccatttaattccgtctaaagaatatttgtaaggagcagttcctccgattacgtttacagttattgtattgtttgtaatatcgatgctggaaattaccggctgttcagaaggataaacttttacagtctgttttgtaacgcagtttcctgttttaagctcaacccagtaagttccaactgttacattgttaattgcctgtgtggtagctcctgtactccatttgtacgcggtaaatccaggtcctgcatctaaagttgtcttatcttccatacagataatcttatcttcaagtacgcttgaataaaccggcggaagaacaattaaagttacttttgctactgcatagcatccgtttccgttggttactttaatgtatgctacaccgttcggagcagtataggtactaggatttaggatcgcattcgttccgttgatagcatccgtaagcgacggataatatgtttttgttcctgcctgagtagttacaggagccaaagtaagatcaaaagttgccattgcaggattggtgtcaagataacaagatcttaacgttgcatctgttaccacaacaacagggaagaagtttaaggtgatttttgcaatatcagaacatcctaagttggttgtaatttttgcatatacatctcctgtagacgatgtgtaagctgccggattcaaaatctcattggttccgttattagcgtctgcaagtgttggataatactttataacatacgtgtaattcgggtttggtgtatataatgttgtggaagtaagatcatatactgcaaccccgttgttgttgttattacaagatgttaaacttgcatttgtagctttaaaggtaacatccttaaatttaaatgcattaacgttgaaacatttattcgtcgggttattaggattcgttggatccagataacgaattgtataataataagtactggttgtatttataacaattggagaagtaatagcattggtatccgctaaagcatcattggatgttctgtaatattttacatagaagttagggttaccgttaacaatattggcgctgtttgtctggaaattgtaaggagacgaaatgtcgcaaacttcgatgattctaggatctgatgcagtagctcccggaattccgataggattaaacgggttaggctgaatcgcaggatcgttgaatggtgaagttaacgttgccgttcctccccaggttaatgaaaatgccattgcagcgtttgctccggaccagttatccacaataagataataggtttctcccggaagaacattcagcgcaggactccatgctcctgaatttgcagtaagacctgtctgtaatccggtctggttaggaaaagcttgtgcacctgcgtagttacaacgaatcggagcaccttttgtaccacaggttttattaggtccatatacagcaaaatcataatccgcagtataaggagcctgtggagaaatcgtaaatgttaacgttccggctgttgcaacggtaaactcataccaaaccgaatagtgctcgtttgcacttaaacagcttccgttggcatttacctgatcatccacacttccgggacccgtaggaaaataagaaatatctgagtttccacatactctaattgcagaagcacagtctgattgtgcaaagaagaattgtgaaaagattaacagtaatataaggtagatttttttcataatagtcgaatttatcttgattatgacagattatttaagggtagaaagatagtagttaacatcatctcttccccaatttggatccaggctggatttcttactatacgttttaaatttagccaatgctgaattgaaatacgtttttgccgtttctttatcagaattcaaggcaatctcaccttttataatatcaattctgggattatttttatcatcagaagctgcttttgcaagatattcattagcttttgataaattggcagcactgtccgccggattagttgatgatttaagtaaatatatctgagccaaaagaatattggcttccgcattattaggattttttacaaatacgcctgcaagatatttttctgctaatcctgaagtttcttcaatattttgagcagtaccttgtctttgagcactgatttccgctcttaccaatgataaagcagtgtaataatatgctctccagtcttctttttttgtttctgttcctctggaaagggtatttacatatttcatgaaataatccttagactgctgaaagtcttcggattttttagcagactccaattttgcaatctgagtctccatacctttctcagcggaggtttgagcaaagctgtaagaagccaccaccatagaaaggagaatagatagtttttttaccataatagaaaatattttatagacaaatataaaaaattattaactttaatttgaagtttttaagatttatttaataaaaacgtgtatattgccctaatattgcatttttctcaattttggattagtcgcccccacaataagtgcaataagcaccgtcatgattcctccgaaaactacagaacgtacaactcccagtaattttgcagataatccgctctcaaactgtcccatttcgttgctcgacataatgaagatggaatttacgctcagtacccttcctctgatgttgtccggcgtttttagctgaacaatcgttcctctgatcactaccgaaatcccatccagcattccgctcatcacaaggaaaaggaatgaaagccaatataagtttgaaagcccgaagccgataatacaaagcccaaaacctgtaaccacgctaagtaaaatcttaccctgattttttcttaacggaatcaccgataaaatggtgatgatgcacattgatccaatatcagatgcggcattcagtaacccgaatccttccgctcctacattcagaatatctgttgcataaaccggaatcatggcaacagcgcctccgaaaagaacggcaaacatatccaaacacagcgctccgagaatttcttttgttttaaaaatatacgaaattccttcccgcatactatccataacgttaatattctcttttttgtattcggaatgttgtttttttaactgaaaaaagaataatgaagccaaaaagattaacgaaatgataacaaccagcgtccactttacaccaaaataaccgatcagaaaacctccgaccgcgtgtccgcaaaccgaagagataagaaatgttgcctgatttaaagtaacggcattcggaagattttccttttttacaattttaggaatcatcaccggaataatcggtccgatgaaggctctcgcaatacctgtaaaaaaaataactccataaataaagtacgtgatttcatgtcccgaaaaatgaattttaacattgaaaaaagcaggaatcagcaaaaggcttattaaaaaaatatagacatagttgcagatcaggagcaggcgttttttttcattcatatcaataacatgaccggcgtacaaagcgcagcttaccgcgggaattacttcggaaagtccgattaaaccaattgaaaaaggatcttttgttaactgatacacccaccatccgagtaaagtagcgagcattctgaaagccaaaacgataaaaaatcttccggtaagaaggtttctgaattcgacatttttcaatgtctgaagcggggtaaatgaaatcatccgacaaaaatagcctcaaatattaacttgaggctattgttatcgtcattttttaaatgaaaaattaaatgagacttaaaagataaaatctattttagtctgctcttgaagcactgaataccaaagcggcaactcccgcagctccgataatggtggctccggttgtaattcttgcttttctgctgtctctcacggctgcaacattggctttaggaatggttactactgtactgtctttctttcctttcgttccgataagattatctccttccacgttacggaataacattttttgatttttggaaccatctctcatcattacagtatacacttttcctgcctctagattagaataatcatttttagcagtatccatactatattttgtggttgtacaagatgaaattacaaataacgacgttaataaagatgattttaaaagtacagatgctttcattattattttttagttttccaaatttataatttttttcgaatatacgtttccggaatcaaaaaaatgtgcttaaagtttataaatttctaataaatcggcgatttttctgtcattcgcaagtcttggcgttttgttttgtccgcccagttttccctgagactttgcatattcgtggaatgcatttttcttcagagctgtgaggttaagtttttgcagaatatttcccgaaattaaatcatcataataggtattgcgctttctgagctggtcgtcaagctcacttttaaacaaatccagattttccggttctttttcaaactcgataaaccattcatggtaaggaagtccttcacttggattgacttgcggagctaaatgaaattctgtaatctgcgctggaaatttttccaaagttgctttcatggcttcttctacttcaaaagcaatcacgtgttctccaaaagctgaggtgaagtgttttgttcttccgctcaccaaaattctgtgcggatttttatcgataaatctcacgacatctccaatggaatatgcccaaagtccagaattggttgttaaaattaaagcataatctttattcagttcaacatcctttaaggtcagtctttttgtgctatgttgatcggagtcgacgcgcccgtattcttccagaggaataaattcatagaaaatcccatgattcgttaatagcagtaagccttccttcgtgtaatcatcctgaaacgcaaaaaaaccttccgaagccggaaatgtctgtacaatatccacttttcctcctaaaagttcttccattttgtcgcggtagggttggtaattaacgccacctgtaacaatcaactgaagattagggaaaatctgttttatttttttgccgtgcttttcaatcagcttttcaaaatacataatcagccagggcggaattccggagatcagcgtcatattttctttttccgtttcctctacgattttatccactttggtttcccagtcttcgatgatgttggtttcccagcttggaagtctgtttttctgcaaataatcgggaatatgatgggctacaattccggaaagtcttccggtttttattccgtacacttcttccagttcaggacttccttgtaaaaagatcatttttccctgtacaaaattggcattgttttttttagcaatataatgaaacaatgcactttgcgctccttttacctgaaaaggcattccttcttttgaaatcgggatgtattttgatcctgaagtcgttcctgaagttttggcaaaatattcgggagtatcggtccagagaatatttgcctgtcctttttttaccctttcgatgtaaggtttaagatcctcataatccgaaacctttacacgttcctgaaaatcctttaccgttttgatgttttcaaaatcgtgctctcttccgaaaagcgtttttttcgcagtttccgttaaggataaaagaagcttttcctgatcgttctccgcattttttttgaactcttctgctttccggacgtggtttttcgcccagatcaaagctgcatatttctttaggaagtttaccatggttcaaatttataaataactgaacaactggcgatcattttcagaaaataagacacaaaaaaaccgatgaatgagtgtgcatcggttcttcgaaatttgattatgaaaataacaactaataatgttgagtttacttgtttactttgtaccttttatcaggagtaccatcctttttcagttttttgttttccttatatcttttgtccggagttccgtcttttttcatttttgctgcggttggcgctgttgcaggttttacagtagctgccggagcgggtttagcgggctttactgtttttaccgtttgagcttttgttgcagccggagccgtctgttgagcggaagcaagtccaagtcctaaaacaatagacattgcggttaaaaattttttcatagagaatttgtttgttttgttgaatcaaaggtagagaaaattccaactgaaaaatctatttttttaaacttaactaaagtttattacagcttaaaaaaagattaaatgatacatttgatataatgaaaaagcaggcgcaaaatactttggtcgtaatttttgctattggattagtaatcatttataaatctctgtacaaagatgaaacgtatgaagaagaaatagaaaaagaagagataaaatctgttgttgcaaagaagtttgttaactatgataatcaaagcattcattacattgtttatgaaaaagacagtatcatgatttctgaaagttgggatcaatacataagtgttggagattcaatcatcaagcctgaacaatcaacacaacttgtcatcaaaaataaagataaatatattgagtttgatttcaataatcccaatttacttccactgaaataaaaaacctgctttctccgaagaaaaagcaggttctaacatatgtatgaaaagttggtttatcgggtacagtttgctgtccaggtttttccatcttttatgtataagatttttagatcgttgttgtctattctaatgtacgatgttgcggtagatcctaccattaccaaagtgttgtcaccctgtttgttaaattctactccgttaagatccggaattccgttggagaaggcaaaattgtattttgtgccgctcgcaatttttgttacaaatacacttccgtcattggaactgatgttgttgtcgctgtcgttataaccgacgctgcctttgtaagtccctgcaaaaaagtcgttattggcaggatcatcatcgtcgctgcatgaaacggtcgtgactacaaagaataataataggaatgctcctaaaattctgattgcttttttcataataatatttctttagtggttgtagagggggttatccaaacaaagtgccatgtggtaggagtaattttttttttaacttttaatttaaaattttagtaaaaaattaagaattttgaagtgtttaaatactttccaacttcttaaaagaaaaatatttatccttatctttgtatagccaaaacggtttcggaaaactcccgaaatcgctttttgcgttcataccaaattatctatgcaattaaaaaccatcagcgaaaaatttcttccggagcttcttcagaaagaatttggaaaagagatttttattcaactggaaaataatcaacatatttctgtaaaaggaagcgcgggttcttcggtttctatttttgtagccgagttatttcttacccaaaagaaaaccattctttatattttggacgataaagaagatgctttgtatgccaatacggaaatggaagatcttttagggaaagaaaaagtactctattttccggcgactcatctggaaccgtatcaggtggaaaagacgcagaacgccaatcttgttctgagaacggaagttatcaataagatcacatccggaaaatctccgcgcgtaatcgttgcgtatgcaggagcgctgtctgaaaaggttttaaaaaaggaagattttaaggcgatttcgcatcatataaaagtaggcgatcagttggattttgattttgtggatgaactgctgaatcattaccattttcagcaggcggattttgtttcggagccgggagaattttcagtaagaggaggaattgtagatgttttttcgttctctaatgaaaaaccttatcgaatcacatttttcgggaatgaagtggaaagcattaaaacgtttgatattgaaacacagctttccattgataaagtaagcgatttccagttggtttccaatatgaattttacagtaacaggaagcagggtttctttattgcaattgctgccaaaagagagtttcgtggtttctaaaaacggaattgtgggaatgcagagactgaaatcattttatgaaaaatctctggaaaaatatgaaaccttaagcaaggacattgcacacagatcgccgcaggaattgtttatttctgatcaggaatttctgtttgactataaaaaatttaaaacggttgatttcggaagtgttcccattgaaggacttattgaattatcggagatgaaaatagaccagacttcacaacctgctttcaataaaaatttcgaactgttaattgaaaatattgaaggcaaacagaatgaaggcttcgatacatggatttctttttccacagaaaagcagaaggaaagattggaactgatttttgaagagctggaacataaacttccttttaaaagttttaaatctgaacttcatgaaggttttgtggataatgatcataaaattctggtctacacagaccaccagattttcgaccgttatcaaagatataaggcgaaaaatacatttgccaaatctgaacagttgacactgaaggatttaatgtctttgaaaatcggagattacattgcccatatcgatcatggaatcggaaaattcatgggactggtaaaggtgaataacgacgggaaaattcaggaatgttttaaactgacgtataaaaacggagacttattatatgtgagcattcattctcttcataaaatttcaaaatacaacggtccggaaggtcgcgaaattgttttaagcaaactaggatcgccaacatggaaatctttaaaacagaaaacgaaagcaagggtaaaacaactggcttttgatttaataaaattatacgctcaaagaaaatctgcgaaaggttttgcgtacactccggattcttatcttcagaatgagctggaagcaagtttcctttacgaagatactccggatcaagaaaaagccaccatcgatgtgaagaaagacatggaagccgatacagtgatggatcgtctggtttgtggcgacgtaggtttcggtaaaacggaagttgcgattcgtgccgcgttcaaagcggcgacagacggaaagcaggttgcagttttggttcctaccacgattctggcttttcaacattacagaagttttaaagaaagacttaaggattttccggtaaatgttgcgtatgtgaaccgtttcagaacggcaaaacagaaatctgaaacgcttgcagctttaaaagaaggaaaagtagacattattataggaacacatcagttggcaagtagctctgtaaagtttaaagatttgggattgctgattattgatgaagaacataagttcggagtttccgtaaaagataagctgaaaactttaaaaacagatgttgatactttaacattaacggcaacgccgattccgagaacgttacagttttctttgatggcagcaagagatttatccgttattaaaacgccgccgcccaacagacagccggtagatacgcaattgatcggatttaacgaagaaattcttagagatgcagtttcctatgaacttcagcgtgacggacaggtttatttcatcaacaacagaattgaaaacctgaaagatattgcgggactgatccaaagactggttcctgatgcgagagtaattacaggacacggacagatggaaggaaaacaactggaaaaaaacgttctggatttcatggaagggaaatatgatgttctggtttctacaaccattgtggaaagtggagtagacgttccgaatgcgaacaccatatttattaatgatgcacagcgtttcgggatggcagatcttcaccagatgagaggtcgtgtcgggcgcagtaacaggaaagcattctgttatcttattacgccgccttatgatatgatgacttccgatgccagaaaacgtctggaagccatagaacagttttcggatctgggaagcggattccagatagcgatgaaggatcttgaaattcgtggagcaggagatttactgggagcggaacagagcgggtttattaatgaaatggggtttgaaacttaccaaaaactgatgcaggaagctttggaagagctgaaagacgatcaggaatttgaaaatcttttcgaaaatgaagaagaaaggaacaaattatttaaaaccacaaaagatgttaatattgataccgatctggaactgatgcttccggactggtatatttcaaatacggaagaaagattgttgctgtaccagaaacttgcggagatagataatgagacaaatctgaataaatttgaatctgaactgatcgaccgttttggggaactgccgaaagaagcggtaaatctattgaaaagtgtaagtttaaaatggcttgcttcagatatcggtttcgaaaagatcgtcatgaagaacggagtattcttaggatattttccgggcaatcctcaggataaattttatcagacggataaattcaggactatcattaattatttaacgaaaaatcctaaagaagcacagcttaaggaaaagacaggtaaggaaggaaatcagctgatgatgaggaaggataaagtaagaaatgtagatgaggtgaatgatcttctgaaaacaattctgaagagtgaaatatagttcattgtattatctgatatattttgccgtgttgttatacaatacggcattttttatccatatttttaaagatagctgaaaaacaatattttatgttttttagtattaatgggatttaacattaaaaaaatattaaaaagacggcatgtaacatgatttttatcgtgtttgtaattttagctctgatcgaaaaaattggataataaaaacgaatttattttagtcttgaaatgttataaaaagtttctatttatcacggcttgtggataaatgaataaggtgttaaatgcttttttaaatttgtaaatatttcaatattaaaaagatatgattttatgtaaatcataattcggaagaaaagtaaattatttaattcattaataagggatatttaacttaaaatattattaaatattgatttggaataataagtttttagtagtaataattctactttttagtcaattgctgctatggcgtaattagttaatttctatcagtttacgtatttctactctactttctgtatatttttttatttatctttgcagtcccttattatgaaaaaaactctatatagctgtgtagccggattattattttctgttacggcttacgctcaggtgggaattggtattagtacccccaatgctgttctcgatgtaaacgggaaaaccaccttaagaaaagaattgagagtaggaggtactgctactacgctgggtaatcccggcttaaacggacaggtgctggtttctcagggcgaaggtcttcccccaaactggcgatccataaatgttacttttatggaagaaggtcagtataaactcatcaactcgtatttatcttccgatcaggtgggtatcagtacgctttctaacggtgttgctgcagacggaatttataaaaattctgttggaaacgacattgctgctactgcaaacggtacgtgggtaaagattgccggccttgagaataacttcatcattaaaaacggaaaaaacaggcttacttaccagtttcagacaggagttgaaatgaaagcacccgctgcaacaacttctcaaagtgttacatttgcctgtggtatattccgaaacaataagctggttgcagtacgtccggataagattacttccaataacaataccgataaaggtggttttcaggattatattttcacgttgaattatacggagcagaatgttcctgtaggtactcagaaaattgaggttgcctgcagaaaaattgaatcttcagatatcaattctcagtttaccatcggaaaaaatatctcgaattcaaattcagtttccaatgcatttaatcttgaatctgattttaaggtggatattattgaatatgtaacgtataaaagcaactaaatccctccatgaaaaaaatattattagctttctgtatttccgcaggaattttatcttctgcgcaaataggtataaaaacatccactccgaaatctactcttgatgtaaatggtgatgttaatttaagagataaattatctgttttcaatcctacggataacagtatttcacagggaaataacgatcagatacttgtttcgcagggagcaggaaatcctccgatctggaagtctcttcgcattccggaatatgaaccgaataaattttatttaatttttaataactctttctcagataaaacagggattactttttccagtacggaagaatcttccaatggaacaagcagatctacaacccttgtaaaagatacagatttcagcagtttaaatcagtttaaaaaaatagcatctttatctcagccattctttgtttacagtacggaaagtaaaacctactttcagtttgaaacagtggttcaggctgcgtttcctgccaatgggacgaccgatatttctattgattatgcatgcggaatttttgtagacgataagcttgtgaatctaagacagagaaatataaaggcaagtagtgctaccaatacttttattacgcataaccagatcgggatggtgcagaaccttaccaaagggcagcatacagtgagtgtagcatgctccagattaaaatcgtacaatactacggcaaatttaggtatcggtattaatgtgtcttcaaatatcgacagctttatcacacaatcctcgcttaaagtggatgtttacgaaataccgcaagtatttaattcaatcttaaactaaatcatgaaaaaaatagctttagtaatattttctatattctcattaggatattatgcccaagtcggtataaagactgcaacacctgtaggattacttgatatcaacggggatctgaacatcaataaagaaatgagaatgggcggaacaaataccgtaaaaggttctgccggaacagcaggaaccatttttcataataactcggatcttgcagttaacgactggaagagtgtgaaaattgcagacggacagggaagtatgtctttattttccatgaatacggtgtcggatcagacaggagtaaccttcagtggaaataacggttctacttctccttatgcagaaaactctgcgcttacttcagattggacagtaattacaggagctcaggatacgtattcggtaaccaataccactaataaagttgtttttacgtttcagacaactgctcaaaagaccaataattcaaactcgtcttcaggttttgcgtgcggaatttttgtggatgatcttttaaaagcagtaagaaccgatgttttaatcgggacagacggttcctataaaatttataacatgaacacaacacttacgaatgtaactccgaaaaataattataaagtaaaagttgcctgtacaaaacgaaacctgaacagtggaactttgggaataggaacggcagtgaataccaactttctgaattccgatatgtctcagtctgttttaacaacgtctgttttacagccttattaaaaacagattatttttcataaattagaatctaaaagcgaaagtttttagatttttttattttaaagtgatatttatttaatgattttaaggctttaataggagaaaataaattatatttgacggcattaaaaattaataatatgaccaaaaattacatcctgtctacttttgctgcaattgcccttggttttgtggtttcttgtgacaatacaacggaagatccgccgaatcagaataagaatacaacatcaggtactacgattacaggaccaagaattttatccaaagtaaacaatgggacaaaagatctggaagagtatgttacaacaggaggagcgctttctcaggtttttgtaagagatgctgcgtccagcaatacgcttacttctaccgtaacctattcgggaactacaatttctcagataaaaattcaggataatgtaactccgcacgttacagataatacttatgcacttacgtatacaagcggaaaattatccgcatttacaatggatcagaccgttatgggagtggctaatcacagtgattttacagtatattatgatgcaaacggagtgctgtacagaattgttgagaagaaaaaaatggcaggaagtacttcctatactcattatacagaacttaaatttaccttttcggcaaacaatatcgtaaaagcagattacaccacgatgttaatgagcggaggaactcctacggcttccacggcatctaccacttcttatctgtatgaaaattatgatgttaaagtaaacccttatactacgcttccgaaggaatattttatggtatcttccactatgacgcagctcaactcttatatgctgtctgccaataatgtagggaaagttacgatacagaatcctgccggagctgccatttcttatcctaaagggtatctgtatgattcacagaattatccggtttcagatcagagtcagacaattaaatatatctataaaccgttataaagaagaattatcttttactagttttatgataatatgaataaaaacgtgatttttattcaaaaaaaaattatatttgtgaaaaaataaataatcccctattggaatgaaacgacttttttattttgttttactattggtaggtatttctacaattcattcttgtaaagatttattggatgaagacggaaatcctctggtggatattaatgacaatacaggactgaatggtccgagagctttatacagagagatcacagactcagatactttagcaacctattattacaatggtcttcaattgtctaaagtggtaacagacagtatgaactctactacagatttagcatggagcggagacaaggtaagcagaatcgatttcagaggatttttagatcttgacggaaacggagatttagataaagacagtgttatctttacacagcagtttacttatggaagtacaggaagaatagaaaccatttcagaaaacagatctttcttcaaaagaagtactacagctccatatactcctttagtaccgggaccacagacgctttataaaaagacaaagacactttataccctcaagtatgctgcggcaacggcaaaactggattcaattatcatgagaaacggacctgaagcttcaggaactccatttgtatatacctcttattcaaaaacaaagtatgaatatacaggagataatgtttccaaagtaacgagaaattacggaccaatgggatcaactggttcgtttggttctccgacaactaagttaggatatgagtttacaaactatgatacgaaaatcaatccgtttactttaattccgaatgcgtacaaaatttcaagattattatcaacggaagcgaatgatgtaaaaagctggattttgtcaccgaacagtcctcagagatattctgtaacagatttaaccacaccaattcctacaccggttgtattctccacgaattacaactacgatgcgcagacttatatgcaaaaaggatatggtgtaaattacatctacaaaccattgtaaaaatttacaattaaaataataaaaaactcaatcttcatgaaggttgggtttttttatttgaaatcctttaattttgcaaaaaatttctcaatgaaatatttaattgtcggtcttggaaataaaggcgcagaatacgaaaatacacgtcacaatataggctttaaagttgcagacaaattagcagaaaccatggaagtttctttcaataccacaaatttcggctggatggcagacggaaaatacaaaggtagaagagttctggtcttaaaaccggatacttacatgaatctttccggaaatgctgtacgttactggatgcagaaagaaaacattcctctggaaaatgttcttattgtaacagacgatctggctttgcctttcggaaccttaagaatgaaaggaaaaggttcagatgcaggacacaacggcttaaaaaacatcaatgaagtattgcagacacagaattatgcccgtctgcgttttggaatttctgccgatttctcggaaggaaaacaggtagattatgttttgggaacctggaatgaagaagaaaatgaaaaacttccggaaagaattgaaaaattctccaaagcgtgtctctcatttgtattcgcaggaatcaataatacaatgtctgcattcaacggaaaataattctcagaaaataatatgtcaaaaacctccggaaatggaggttttttgttatttgtacactacaatatcttttatgatcttcttttcgaaaaagtttctttcattaagtgtaaaacgataattatgttcctgctcaaaaaattctatcggagttacaggagctgtgtctgctttccatttaatcacaaaacttacttcattcggagaatttacctctttatcagaaaacctgaaaattgtactcggaagcgcattttcctgatcttctttaatgtcggattttgctttcttaaactgaagctgcgtcatgtctttcagcaataaagaaaaaggttttccaatatatttttgcttattggtttcaaattttttggcataagctaacgtgtcagaaactgttttttgagcatgtaaagccatactgcaaaacaagatgaaggtcacccagaatattttcattcgtattttcatgaaaagaataaaatttaataatcaaaagtaagattttatatagtttggtaatcattttctttgaattttttctaaaactgtttaaataaaacaaaagaccaccgaaatccgatggtctttgcgattgtactcttaaagctaatttccaatcaatttatctaaactataacatttcttatgctaaccaggttacaacgcctgtttctacatcataattggctcctacgatcttaatttttccttcctcttcaagttttctaagagtagaactctgcttacggatatcatcaatcgcattaatgacgttgtgctgattcagtctttccaaaagatctgcattcgcagaagaacgctcttctccttcttcgataatatcattgataatcgggttgaaatgattgatcagatggttaaggttatccattcccaaaccttcgatttttgctgcatcaagaccgccttttaaagcgccgcattttgtgtgccccaatactacgacaagctttgaaccggcaacattacaaccgaattccatagatcctaaaatatcctgattaacgaaatttcccgcaattctgatgctgaaaatgtctcccaatccctgatcgaagataagctctgcagaagtacggctgtcgatacagcttaatactaccgcaaaaggccattgtccttcacgagttgcgtttacctgctccaaaagatctctgttagcctttaagttatttacaaatctctggtttccttcctttaaaaagtttaatgctttttcaggagtaatcgtcgattgcgtttcggatgtatgtgctttcatataatttttattaaattgaatttttaaaggtataaaatttattgttttgagcttacattgctcttttatgcgtaactaaaatgtgagattcttcatctctttcataatctctgtaagacgttttaaatcctaacaattcaaccgtaatgtcttcttcttttgcacggatattggcaaaatcctgaatcatttccagaacatcggttgctatataagatgtttctcttgcatcaataattactttagaattcggttgaatgttttttaatgtttttttgatagctgctttattcaggaaggaaacttcttccgccagtttcatttttatttcatctgcatcatccagcttttcacggcttaaataataagctcttttcatatttccctgaagaatatagaatactgaaatagcaagacctgttccaacaccttttaacaaatcggttgccacaacagccactaccgttgcaataaaaggaatgaactggaacttccctaaatgccagaaatgtttaaatgttgcaggtttcgccagtttataccccaccataattaatactgctgccaaagtcgccagtggaattaaatttaaaaccacaggaatcgacagaacacagatcagcaataaaattccatgaataatggtcgataattttgaggttgctcccgaattggcatttgccgaacttcttaccaccacagaagtcatcggaagtcctccaatgaatgaactgattaagtttccgattccctgagctttcaattccagattggtatcggtaattcttctctgtacatccagtctgtcggaagcttcaatacaaagcagggtttcaatagaggctacaatagcgattgttgctcctgcaatccacactttcggattggtgaatccgttaaaatccggcatcgtcacaaggtttttaaaatcatcaaaagactggggaaccggtaaggaaaccaaatgctgggtctgaatttccagtgaacttcctgtcattttaaagatctggttcaggatgattccagttacaacggcaaccaaagctcccggaagcattttaattcttttaagagccggaactttgtcccaggtaattaggattgctaccgaaattaacgtaataatgatcgcacccggctgaatcgctccgaataattctgtaaaatatccgaaattaagaccattgtcgaatatagattcatgtccttcataatccttatcaaatcccaaagcgtgaggaatctgtttcaggataatgatgatcccgattgcggcaagcatcccttcgatcacgttattaggaaaataattggaaatacttcccgctcttataaatcctaaaatcaattgaagtaatcctgcaataattccggcacaaaggaaaagttcgaatgcgccaagatctgtaatggcagttaaaacaattgccgttaatcccgctgcaggacctgagacggaaatattcgaattactgatggatcctacaacaagacctccgacaattccggcaatgattccggacaaaggcggggctccagaagccaatgcgatccctaaacataaaggaagcgctactaaaaataccacgagtcctgaagggaaattctccttaattcctccgattaatgatgtttttttcatgatgaaaatgctgtgaatagtgatctgtttttatgaacagaccgttgtaaagtttggaaaatgtaatttttaaagcacgtgtttattcaatatcaattggtatgacaaagaatagctatcaaaaaaatctaacggtaaaaattacgcttccggaggcggagaaaatatggtaagcaatggagacagatgaaaagaatcgtctatcagtacaaacgatctgtcttccagtgagggttcataaaacttcagataatcgaaaacatccagagttttaggaagtgttttttcgtaaactataaaagttgaggggtgggaatgtggttcttcttcatttattactacattggttcttgtaagatcccaaccgaaaacttcggcaatactcggtaaagccgtaaagttgagaaaaaacagtaatgtaataatactccagagtttcattttacattctttatataaaaattatttggtctttctgctcatcacccagtctgagctggtaaggttataaattttctggatatcttttaatattttttcaaaatcgatctcaagatcgatgatttttccggttctcagatcgaaaacccaaccgtgaactacgggatattcctctaaaatatatctttcctgtacacacgccattttgatgacgttaatgcactgttcctgtacgttaagttctaccagtctgtcgtagcgtttgtcttcgtctgtaatagaatccagttcagcctgatgcaatctgtaaacatcacggatggttcttaaccacggattcagcaatcctaaatcctgagaagtcatcgcagcttttacgcctccgcagttgtaatgtccgcaaacaatgatgtcttttactttaaggtgttccacggcatactgaataacggctgtagaactcatatccagagtattcaccacattggcaatatttctgtggacaaaaacttctcccggtttggctcccatcagttcttctgcagtcgcacggctgtctgaacatccgatgtaaagataatccggatgctgtgtcttggcaagatcgtgaaaaaactccgggttttccgcgattttagactctacccattttctgttgttttcaaaaatagctttgtacgactgtgacataagagctttttaaaggattaattatttatttggtttaaattaatttcaaaatcaatagaccaaatcgataatgatgcaaaaatataatttttggtcacattctaaatacttttaacaaagtttaatattaaaatatgcttaaaatcataaaagaggtcattaaattatgtttttttatatggtttgatgattctatgataaaattacaaacaatttgatgatgatagctaaaatatttttatttattagatcttattattaatatacccttcagttgcgttttcggattcataaatttttgccggattacccatcacgacagaattttcagggacatcaaaatttacgtaggcatttggcgcgataaggacattgtttccaatggtaattcctcccacgataacggcattggttccaatccacacttcatctccaatggctggaaatccctgattttttccgcgattctgctgtccgatggttacgccttgtgcaatattacagtttttcccgattttagtattgggattaatcacaagacttccccaatgccctagataaaaaccttccccgatttctgtttcgggatagatctggaagccgtacttaatctgataatgtcttaaaacaagtttccagaaaatactcagcaacggcgtttttagatattgctggctctttcttaaaacataaataaaatgaaggttcggattgatgcattttgcccagatctgaaatggagaaagccattttccgctttcccggtaaaaatctttctgaagaatggaatagttttctgccataccacaaatgtaataattctacaggtttaaatttttaatcagttacaattcatccacaatagaaacaattttgcttacggaatttttcagattaaaaggcatttcataattcataagtctttccggatatttgttgaaaaactcaggttcagacaatgctttcttcattccgttataaattccttcttcagaattttcgacaatgagacccagtttaccattatttagcatttcgtttgctccggaaacttccgtagaaataattttctttttcagggtaatggcttcaaaaagaacagttggaaaaccttcatacctcgaacttaaaatataaaaatcagcatttttaaaataaggataaggattgtctgtaaatcctaacatggttgctgtttcatcaatgccaagctcggattttagttttttaatgttttcgaaatcatacccgtcgccaacaattaaaactttgtgctgaaaaccttcatccaaaagttttttatgaactttcaataacctgtcgaatcctttttgtggaaaaacagttccgactgaaataaaggtaggaacattctgatcaaactgatagtttataactggaaggtctgctttggcaagaaactcttcggtgtctaaaggattgtagatctttacaattttttgtttttcagtttcattttttgccagactttggaaaagctgctctatcttttcagaaatcaccatgattttgtcaaacccaaaaaacttacggatctcatcattggtatagcctttcacctgtgaaagatcattgtgaatccagacaattttttttgaactttttaaaggagatcctaaaatttcatcccgcattccgtggatggctgcgaattcaatatcgtactttttattttttagctttcctttgtaaagaagatttgggaactttttcagtattttttcatgaatgactcttgctgcttttctcggaatttcgtgaggacggttcgtggtaatcatttcaccttgatgaagatgcagaatattgatccaactcggaacttctgctaaatatttgccggaattcagattcagtaacaaatcaatctcatatttatccttcggaagatttttaaggaatgtcaccagaactttttctgctccgccatgacgcagagagcctatacggatgagaattttctttttttcagccatttatttctttacgggtttgtaaacatgaggaatgttttctttaatgtaagcttcaagttttgctctttcaggctccagttctctcgggtacattacattgttttccagtgctttatctccatattgttccactgtgcagataaattttgccggagttccggcataaacagaattgtcgggcatacttgaattcagtacggaaccggctcccaaaatacaattgtctcccatctgtgatccgggaagaaaaatacagttgtttcctacaaaacagtttttccccagctttatccttccaaaatttcttgcatcctgatatttttccatacttcggatgacatacattgcgccgtcatgattaataaatttgcagcccgccgtaatttttgttctgtcgccgatttcaattaaaaaaggttctgaaccaaaatcaggagcttcaacaaaaattacatctttccccaccttcagtcctctcgcaacagaaattttaatataaatcttctgaatgatcttttgataggtggtatgaattttcagaataagacggtaaaggaaaatcatttttctttttttgctaaattaataatgatattttctacagcattaaaaatcttctgattatcaaactgttcttcaatattgatgagatttttcttgatttcggcaattaattcgggttctgtaagaaattttttcatcgatttatacatctcttccgtttcataattgatgaggtagcctgtctttccgtgttctatcatttcaggaattcctcctacgttggttgaaataattggtttttgaaggatcagactgtcggcaataatcagaggccagctttcagattcagaaggaaggatgaaaaaatctgcattttttacatatggataaggattcatagaagatcctaataatttaaaactgtccgttactccaagttcttccgattgttttttcaggttattcatttcttcgccgtcgccgattatgatgatatgatgatcgaaatcatccttcagtaatcttgcgtgcgcttccatgagtttatgaaaaccttttcggctgtgaagtctcgcaacagaaacgaaaacaggtttgtttggtaagtcaggtttaaaagctaaagctttctgttttaattcatcaataggaatcgcatttaagataacctgattttcgggaattttaagatcaggataggtttgaattaaaatatccttcgtttgctgagatccgaaaataaaatagtcaaattgaggaatctgctttaaaatttcaggaaccaaaggctgaagtttcggcagagtaatatcggagtgaaaccagcctattttctttgattttttattagcagaatggagaaccgcagaaaaagcagcgtaagtaggagcaatttctacatcatattcatcattaaggattttctgagcgatggaaggatttctcaaagcattctgaagtcttaattttctttttgctaactgtagtttttggataagcggattttttgaaagatcttctctgccttcagtaaggtaaacttttcttacatgagcgggaatttcatttctcagttctccctgattgatatttaaacaaatggtaaaatcaaacttatcctgattaagattgttgaacatgcttaaaactactttttccacaccgcccatttccatagaacgatgcctgaaaagcacttttattttattatttttcgtcattaactaaagatttgttgggcaaatattattagtttctttttaattttaaatgaaagtgaattctgatactccaaaagactgtagatttcctgagaactgttatattctttcggaaccggtttatcgttgatggaagttaaactcctgcgtttcatggtgttgaaaattacttttgcaaaatattcgcgggattttggcttattgtcattctgtgaaattccaccggaatgaagcctgtataggtaatttgtttcattaatgaactttacttttcctttttcatacattttcagatacaaatcctgatcttcagcaatcttcatttccgtgttcattttttccgtctgattataaatgccctttctgaaacacacgaaatgcacaatatttacagggcagttgaaaaaaaacggactgttattaataacctgctgagcgattttaggaacctccagaattttcagattttcatcacattttgcaaatttgctgtaagtaagaacaacatttcgttgcttttgaaaaatttttatgcttgaagagagcgcattcggtgtaatagcgtcatcaggatctacaaagccacaaatatcaccttccgccagttcaatcagtttgctttttgtaattcctacaccgctgttttctatattttcaaaaattttgaaacggctgtcttctccgattatatttttgatgatttctaaagaattatccgtcgagcggtcatccagaatgataacttcccagttggtgtaagtctgcgcaataatggagtcgtaacatgtcctgaaaaactttccattattataattggcaacgagaacagaaaatttcatcccctttttgtgttaataaatttttacaaagataattatatcctaaagataacagaaaaatctttatttttgtggcttaaatttaacacagtgagcgaaatatccagagttctcaaaacgtttatagcctatcttaaaagacctgatctttaccctgaattaggacgtaaaattgtaaaaaataccgtaaaccggggaaatgcctttaaaggcaaagaaaaaacaaattcctgggctgcctccagagcggtttctcaaaagcaggcggtttctcagcttttcgggatcgaaattgatccttttcagaaagatttcgctgaaattttaaaagattctgaaagaagacagaatgaatgcccgattaaaatgggaggagcgggagctttagaactgatttattattcctgcgagtttacccatgctaaaaatgcagtggaaaccggcgttgcatatggatggtcttctttggcagcattgctttcattaactaagagaaacggaatattgtacagttcggatatgccttatctggcgcaggatggcgatcagtatgtaggatgtattgtacctgaaagtcttacctccaactggaaattataccgttttgcagacaaagaatcgttaccgaaaatctttgcagacaacgcatcttttgacgttgtacattatgattctgataagagttataacgggagattctgggcttacaacgaattgtacaagcatttaagaaaaggcggagtttttattagcgatgatattggagacaattctgcttatcaggatttctgcgaaaaaaatagtattgaaactacggtagtagaatacgaaggaaaatacattggtgtttttgttaaataaaaactattaaatgtatttttgattcgtgaaaattagtcagattacgtttacaagatttttagccgcaatagcaattgtaatttttcattatggtgaaggcgctttagtttataaaataaaatatatatcggagatttttgctaaggcgaatatcggcgtaagttatttttttattctttcgggatttataatgatcgttgcttattatagcaaagaaaaaataaattatattgatttttaccgcaacagggtcgcaagaatttatccactttatgtagttggattgcttctctatttgttgattcggtctcaggaaactgcttttttcccgattattgcatatttgtctggtgttcagagctggcttcccggtaaagctttaattttaaattttccgggatggtcgatttcagtagaatttttcttttatctgatctttccttttctatacaattatatttatgccaaaaagaataaatcgatttggatcattgccattataatctggattgccactcaggttttttgcaactacttcatgttttccggattgtatgagggaagattttccaaaagtcacgattttatttcttattttccactactgcatattaatgagtttctaatcggaaatctcgcaggaatattttttattaaaaattgtagacaaagaaactatgactgggcgatatttctggttttcagtttaatattattttccctgctgtttgtacctctatattatcatgatggattaatggctgtattttttgttccgctgattgttttaatctctctgaataatggttttttaaccagaataatgtctataaagccgttagaatatatgggagaaatcagctatgccatctacattgttcacattcctgttctgtttattttaaggtcgtttttgtgggattatttcagaatctatgatagaagtatcatcttttggatctatattcctgttttaataattatttcaggcattttttatcaattgatagaaaaaccctgcagagattatttaaagaagataaaattcggataaaaatatttacttttgttaaacataaatgaataaattatgacagaaatgctgttcccttttcctattttcgttcctgataatagctgtttatcaatatattctgcataagtttttcttaaaatcttcaatttaaaagaatactatgctatttaattctattggttttctaatttttctgccaatcgtttttatactttattggtttgtttttaataaaaagtaccaacatcagaatgtacttgttctggtagcaagcttctatttctatgcctgttgggactggagatttctttttctgctgatgttttctatcgggctggattttgtttccggtattatgatcgaaaaaagcaaaagcaaaaaagaatccacattttggttagcactcagtattattataaatctgggctttttaggttttttcaaatattataatttttttatagaaagtttttcagaactttttggaagttttggtttccacatcaatatctggctgttaaaaatagtccttcctgttggaatttctttttatacgtttcatggtctttcttatgtgattgatatttataaaaagagaatttctgcggagcggaattttatagattatgctgtttttgtaagttatttccctttattggtagcgggacctattgaaagagcaacccaccttttgccacagattcagagaaaaaggacatttaattatgaacaggctgcagacggaatgcggcaaattctctggggcttttttaagaaaatggttattgcagacaattgtgcgcctctggtaaatgaaattttcgcacattatcacaccgaaagtgccagtaatctggttttgggagccatactttttgcttttcagatttatggtgatttttcggggtattctgatattgctcttggagtttcaagactttttggaatagagcttctgaagaattttgctttcccttacttttcaagagatattgcagaattctggagaaggtggcatatttcgctttcttcatggttcagagattatctttatattcctttaggagggagcaagggcggactgataatgaagatccgcaatactttcatcatttttttagtctcgggtttctggcatggagccaactggacatttattatctggggcggattgaatgctttgtattttatgcctcttttactgatggataaaaacaggcaaaatcttgaagttgtagccatggataaatttttaccttctttcaaggagatttttcagattttaattaccttttctcttacctgttttgcatggatttttttccgcgcggcatctgtttctgaggctgtttcttatattggaaaaatttttaataagacgattctttcagttcctcctcattttccatataaagtaatggctcttattggaataatgcttattgttgaatggctcaacagaagccgctttcacggtttggaaattgaaagatttcatccgtggctgagaagagctatgtacgcagtgattatttttatcattttccgttatgctaatttcgggaataatgaatttatttattttcagttttagtatgaaaaaatttttattcaaattatcattttatctgataggctgtgctgtcgtcttggctgttctcggctctttcgcagatggaaatacagacgataattatatgcatttcgcagtagaaaagcctgaaaatattattttgggagattccagaggttctcaggctgttcagccggatattttagaaggtaagcttcataaaaagtttgataatttcgccatcaatgtcgttcagtcaccttacggaaaagtttatctggaagctctaaaaagaaaaattaaaccgaatacaaaaaatggcgtttttatactgactgttgatccctggaatttatctgtcaataaatcatttgatgagtctaaagattttccggaaaaagaaaattctccattaggaaatatgtacagctatgatatgtcgcctaattacgaatatcttttaaagaattatccaagaagctggtttaaaatttttagcgaaagagaagaatcgggaagatccaatacttttttacataaaaatggatggcttgaagtaaatgtaagcatggaaaaagattctgtacaaaaaagagcaggagccaagctgaaattttacaaagaagatcttgctaaaacacagaaaatatctgcaaaaagaattcaggcactggaagatatgattacatttctaaaagataaaggaagtgtatatcttgtaagaatccctgcttcgggtgaaattatgaatgttgaaaacagatatagtcctgatttcagtcaacgtatagaaaatatttcaaaaagatatcatgtagtgtactttgatttttcttcaaaagctgaagattatatttacacagacgcaaaccatatgtacaaagaatccggaaaagtttttacctcacagatcgcggattctatacttataaattcgaaacatttaaaataaatattctctgaaattgatattgtaaagtccggaacgaatgcttctgtagtctgtaaaaagatacttggtaatcattccccattttttaaacgttggagcaagagctatttcgtagcttctgtgaattcttttgatgtgtaattttatatcttccggaattgtgttttccttctgtgcccattcgtttacttctttccacagcagaacccgggttatcgcaggatttacttttttagaatctactgctgtaattctgttactttcgtgaacgcctctcatggcaaccgctttatccaaaattcccggataaagatcaagataataagataatctgaacaagaattctgtatcctgatgaagccttaaatgcgttttaaaaaaaggattaagctttctgaccatagaatctctcctgatcgttaaacaatcgatactgaaaagcccaaagcttcctctcatatgaagctgtcccgggaaaacatctttgggattatgttttttataaactgtcgttaaattatctttaaaaagactgtaatattgctcttttgctttttccgagtaataatgaacgcctaaagcaccgtaaacaccttctacttttggatctttaaataattctttttcggcatcaaaacggttgggcagataataatcatctgcatccagaaaagcaataaaatctccggtagctttttccagtcctaaatttcttgtttttccagctccgtgatttcctttgtcgggatgctgaaacagctttacccgatcatatttttcagccagttttttacagatttctaaggcattatccggagattggtcttcaattaaaataacctcatatacttcctcaaactgcagagcagattccacagcttgggttacatatttttcggcgttgtaaacgggagttatgacggagattttcattacttgcgtatattttctataatttagtttgagtgaaaatatatttatcttaacattttaataattataatttaatattttggcttttgtttacagctaaataatttgtagttaaatatatttcaaaagcttcatgataagtaattttttgaacgccatcttgtagaattctataaatatcataatttgataatatagagaaaaaatcttttagtttgttatttgcatggagactggcaagtccaaattcaaattgaattattttgatttgattatttttaagtgcttctctagctcctttgaatgcttgtaattcgtggccttctacatcaatttttaaaaaatcaatctggttgatagaattttcactcataaaatgatcaatagtttgaagctctatagtctcagttttattaaggttcttatagagcctttcatatcctgtattttctatggaagcccaaacggagccgtcataatcaaagtggatttcagtatttccaatacagttactaaaaccaaattggtaaaacttaaaattttcatgtttaatatctttaagtttattggctgcatatgacataggttcaaatgcgtaaataaagaaatttggtttaatattcttaataagtgctttactgtaacttcctacgttagctccaatatcaaatatgattatttctttattggcaaaaacattattgataattttgaatacatatttttcaccacttttttcgtagtcagatccgttaccatagttcatgccttttagagaaatataaaaaagtttttcaaagaatttttgataacttttttttccatacaattttaatgataatttttttgagatattcatgaatgagtttttaagtaataattttaagttctgatgttactgtaagaacttttgttttaattaaattttatacttctgtgttctgcctgtaaatatataagttttttctcttcaatacttttattgagattttttaccaatgcctgcggagtgagatagtcattataataatctaaaacattttttctcatcgcggcaatttccagctcctgaaaagtgaaaatttcattcttaagaatttgttctaaatgatgaagatcttcaaatacaattgcatttaatttatgtttaagattaggatacattacttctgcatattctctttgtataagaggaatagtgccaactgacattgcttcaatcacgttatgacaaagcggcattacgactccgggacaacataaataaaagttgaaataggagagtagttctctaatatcctccatttttatagggtagttttccttgatcgcgaaaacatatttttcatctaaacttttgtttggagaaacaatatcttttttaccgtaaattgaaataaacggctcttttttctgaaaaaaatctaaaagtgcaactcgtgtttccacagtaaaagcagttcttttaatatccaaataagctttagcatcaaaatttccgtagcagaaaatagaattaaatctctttctttctgtatcaattttatgattccagatctcttgattgtacataaaaggatggaagctcataggaacatgaaaagcattttcatcagtattattatgttcgaaataagtggaaaaataatcaggactgaacattttatcatttatttcaatacaattttcaggaagatcttttttgtgaatacttaaaaagtttttttcccggacaataagtcccaaatagcggtctttatttctcagatttctaaatcttgcaaaattcatgggatatacaatatgatattctgaaagctggtagaatttaaccagtaaataaaaaaagcgatggtatagatttgggtttttaaaattgatcaataaagttttgtccttcttcggcggactgtaaaactttaatttcacataagccaaagaatcgctcacaagccttttgatctggttaatttttgtattaatcatgaggattgtttaaagcatgaaaccgatatcttgttttcagaaattccggattttgcagtgctgtagctaaaaatgaaagccatttttttaatcccttctgattcgctattttgaagctgaaataatctagtgctattttttttgcgaattctttttctaaagaattcgctttactccataaataaacagactcattgtagagtaagctgtttttataaaattttgaagaataaggctttatcttggtaattctgttgtcatcatgaattcctctcatggcaatcgcctgatcgataattccggactttagatgacagagatatgctagtttaagattgaaatcagaatcctgatgtactcggagatttacattaaaacgaagatgaactttgtctaaagcagattttcttactgttaaagcattcagatgaaaaaaagagccgaatgtttttgaagttaagcccaacaaacctctgaaaacacctcttccttccgcaggataatttacggtggtaagattagattctttaaatttctgctgaaattcctgtttgcctttttccgttatgtattccacgccaattgctccaaaaacaccatcgattttagaatcttttaaaatttctttttccgcatcaaaacggttgggaagataataatcatctgcatccagaaaagcaataaaatcgccggttgatttttcaattcctaaatttcttgtcgctccggcaccgtgatttccctcatcgtaatgccggaataatttaattctggaattttctgaggttagctttttacaaatttctaaagaattgtcagtagaacaatcctctgccaaaataatttcttttacctcatcgaattgcagagcagattctacggattttctcaaaaatccggaagcgttgtaaacggggatgatcacagaaatattcaggttcattcttttatttctaaaatgatactttcttgataagattgagcaaactcctcaggaatatcgaaggatttttggctttctgcttcattaacatgacgaccttcgatagcaattttttctgttgctttctttaaaaaccacatatactcaatatcaatatgtcccacgtctaaagcccagtaatttaacttagcaagatcatatgcaaggatagtagctgttggtcctaatgagattaaaataagtttatttttaccgtatttatcaacttcatttaaaattttagaatagcattggaaggcatttttatcaggacagattattctatttatactttttgcattatcaaacaaattattaccaattccaagtctggaatatctgccctctacaattaacatttcttgcccattccatatttttttcaagaggcaaactgtttttgatatgtttttttcagatttgttatgatagcctatataaaatcttgttataaattgattaccgtatattttttccttatttaagtatggaagaattctttctccataaatatttacaaattttttccaccaatatttggtttgaatatcaaatttttttgaagaataaaagggttcaggaagacaaacgagatgatttgacagattagatgagacaacttcttttaaccttttacttatttcaggattgttattttggaattcgagagaatattctggaaaaaataaacgaaattcgccatctccatatcggcttattgattttttttctttaatgatcttctcaattgttttctcgaaacttaaaatattgaaaaccggaaaattctttcttagttttcgtgttttaaacaaccattgataataataaaaatatgaacttataatttttttgaataccattacaaatatttttcgttgttatgagcccaaagagccaactgcaaaagacaccagtgtttgtaatctttggtcagtaaattctgagtcgccttgaaatcgatgtaattaaaaatcttttggttaggattttttaacagttcatcggaaaagcgaagaaggctgtcttctgtaaaccagtttttaacattcatcccgaatccctgtttatgtcgttttctgatggtttccgtccagtaagaacccatcgcttcgcgaagtataattttatcgttgtcattattaagcttaagattttccggaagctgaatacagaattctgcgaaatccagatcaagaaacggtgttcttacttctaaagaatttgccattgccattctgtcggattttaccatcatattcgaaggcacaaaatcctcgatatccagtcgcatgatgtcatttaatgaatccggatccggaataaagctataaggctgctcataatctgaatgcagtcctaaagcctctctttcttgctttgagaaagctcttctaacatagttttggtgaaaatcgagaatatttttgttttcaatattctgttgactgataaaagagataggttttattttctgatacagctttaatccaaactgggcaataatatttttgtaactgaaatgatttctcagtttattttcaatagtgtagaagttgtagccgccgaataattcatctcctacatctcccgaaagcacaacggtaagatttttacgtgcatttctgcagatttcaaaatgtggaattgaagaataatccgcaaaaggttcatcgaaaaaaggagaagtttttaaaagagccgttacgagatcttcctttttttcgtgaacttcaatatgattggtattgtatttatcagctatttctttggcatattttagttcgcttgcttcgtgatcgtacccgaaactaatcgttgtctgtttaggtaaaaattcagcaacaagccctacaatagaagaagaatctaaaccgccactcagaaaactccccacttcaacatcggctaccaactgttttttaacagcattctttaaaagataagtaaattcctctttagcatccgataaactgatggtactgtcttttttgggaagactgtaatatcttgaaacggatattttgccgtctttccagatcaactgatgagcaggagggagggcatgaatattttcgtaaatactctgatatgtacttacataaccatgctgaaggtaatgagaaagagccagattgcttacttttggacggataagccctgaagcgaggattgctttgatttctgaggcaaaaataaattcattattgcttccaattgcataataaaaaggtttttctccaaaacggtctcttgcacagaacagttcctgcttttcgttatcccagatggcaaaagcaaacattcccggaagatcatggatcaggttttcttttttcctctgatacatggcaagaattacctccgtatctgaacttccacgataaggatattctggataatgtgccttaatatcctgataaccgtagatttctccgttcagtacgatgcattcgttttttgtagaggaaaacatgggttgttttccgttttcagaaagatcaataatagaaagtctgcgatgtcctaaggctgcattttcgtaaaattcaaaatgagaagaatccggaccgcgatgcgcaatggcatcggtcatttttttcagttcttcctgataatttctggcgttgttggtaatgattcccgctattccgcacatccttttaattttaattttaattgatcttacttatttttcgcaatagaaaatgtcttcatcaggattaagaccaaatttcttatatttttccgaaatatttattgtttttactttaaaaccaacactttccagccttgatgtataatcctgtccgtaaattctcacatgatcgaactgcccgaataattcttctcttttatttcgatcggtgatggtgaaatcttcatgggtctgctgattatttttggaaataggaacctgcaaaacagcatgacctcccggttttaagactctgtgaagttccttcattgcttttgtatcttccggaatatgttccaaaacgtggttgcagatggcaagatcaaaatgatcatcttcataaggaatatccatcacattcatattttttacatggcttggataatcataacctttggtaaataaatctccgcagatgtattcttttacatttgattttaaaaatatattggaaagcttcggttccggagcgatgtggagaatgctgaaatttttgttgtctgtaactttcagttcttcaattaaaaatgcatataaaagtctctctcggtctcttgaatggcatttgtagcaacctgcagcgcgtcttccgccgccaattacctgtttgtctcttagtactttaagatcatgtcctaccacttccagatctttagaatcgtaaccgcaatagggacagtgataggtggaacctgaatgggaaagtagttttattttgtttgcaattttatttatcattttaagtatttttaaatattgaatatggatttacaggttcagaaatgagggcgatttcttttccacgatatttctgagttcagttaattttttttcctcggaaacgattttcttatattttgatgctaacttctgatagttatttttctttccggtaaacatattttttagcatactttgtttgagtgcttttttctctgccttaagagaatccggaatagagggattcatgatattggtttctattctgaggtcttcgtattttgtataatcgaccttagacaaagactgttttccgtcatgtaccactttgctttccggaacaagtaatgttttctttttgtggaataaaatgcggtttacatattctagatcttcgccgtaatgaaaaaaataagggttgaatcctcctacagtttcaatagtttcctttggtaaaaaccaatgagcggcattaatgaagcttatttcgtaaaagggtagtaaagtctggaaatagagatcagaaataagacgggtctcaaaattgtgggcaatgtatttatcaagaaaaatatccagtttctttccagttccgtcgatatgcatcggactcagtatgcctatttcttgtttgtcgggatggagattgtaaacattcagaagtttttccaggctgtcattaaaaatccatgcatcctgattcatcagataaaaaaaatcagctcccttttgataagctttttcgattccgatattattggcttttccaaatcctaagtttttttcggactgaatcaattcaacttcgggaaaattggacgtaataaatttttgtgtgccgtctgtagaaccattgtctaccacaatacagtgaacaggaacagaagactgccttaaacttttaaagcatttttctgcccatttcatggcattgtaggtaacaataataaaataaattttaggcatttgtgttatgttctaaatatatttgtcagctaaattttttaaataattttcagcatctgtttctttaaagaaatcattgactgattcatcaaaatcaactttataaaaatctccttcatccgattcctgataatttgcttctttttgaagcttatattggatagctcctacaatttcctttaaatcataataatacggataggcaaagttaatggtttgattattaacatttgtacagtttgattctaaaaatttcgtaatgtcatcaatatccagcaataatcttctggctttttggtgtagaataaaattactgccctgtataatctgtgttttaaggaaattaaacagggtattcgggtttccgcctttgcctacaatattaccgacccttagaatgatatagtttttgcagttttcttttatgaaattttcaatttccagtttgtgcagaacatatgggctttgctgttttgaaagatcattcacacttaaagtagaaaaataaaaaagctttttttcctcatgtggtattatgctgttttttagaagagaaaattctctttcaaattccgagcttcttgtttcgagggaatttgaaactccggaagcaaagtaaagatggtctttggaatcgatattttttagtgagttggcaatgagtccgtttcctataatcatgcagataagccttttaataaatttttaattctttgtgtgtttgttgatatttccggaatatcttatgtattgataatatttttttaagatttccaaatgatttttaaaattaagttttttaggataaaatcgtaatgtaaataaaatattttttcgattaacaggataatatttaaaataattatacagaaaaccctgaaataactctttttctacgttaggatctattttctgtttaaaatctaatcctagtttttttcttatgtatatattggaatccagccattttttatcaggatttccgccggaaaaatgctttattaaaatatcattgattacaaaattttgaagtttttgggcaactcttaagctgaaatccagatcgtagccatgaaaaccttttaaattttcatcaaatctaaattcattataattttctttcctgattgccatgaatacaccatctacagcgaaaactttagtactgttttcttctgtggaattaatgtgaaagaactctgcattctctttattgccctgtaaaatatatacagaattgtacttttcagcaaccgtccagcttgatggagcaaatggcacataggatgagcccgcaacgcccacaattcctgtactttctttttgtaaatgatgcagcaatttgtttccccagtttctggtataaaaaataaggtcttcatgcagaaaaagaagattttcatatcttgctttttccgctcctgaattgtaagcttccgtaatgctcatcacattcgggttccacatctggataatttcatataggaaaccttctccgatcgtttcacgaatgttttcagtgagctgatcaaagtagtacttctgataggatgaaatgatgatggagagcattctaggagaactttataattagtttaaataatattctgttgatgaaatttttatttactttttcgttataaaaatctaagttattttttaaattttcctgttgctcaaaattttcaatagcatttttattttttggaaggtattttttaagatgctttttataaatgtagtttagagagaagtctattttatttttatcctgattaattgcaacatccatagattcttcttttcttctataaaaaaagcctaagtaatttagacataacacttttctgttctcatccaacatagacagccaaaagtcccaatcttcttttccgtagatcaattgaatgtcatacccatttacgattttccaatcttcttttttaaaaaatgcggaacagaatattaagttttctaccagtaaatgttgatattggtagcttggtaatttccatgaatgatttactttatcaaaaaactcagctttacaatagattacggtatatccgtcattaaatttttgtgaagccagttccaaatactgatttccgattttatcatcggaatctaaaggaagaatccattttccttttgctatctcaattcccgcatttcttgctgaagaaagacctccgtttttcttatgtagataaataaagcgattatctttttctatccattttttagatactgcttctgtatgatccggtgaaccatcgttaacgatgatacattcccaatactgaaaagtctgatccagaaccgattgcagacattcatcaagatattctgcctgattgtaacacggaacaatgatggaaattataggaatcattttagataattttattcaaaagcttataaagaggtctcggaattttattttttaaagcaaaattaagccttttaagatgatagggataattgttatatgcctgaagatattcccgagaaaatttttctccgttaagatacagtttttgtgttttgctgttaattttttgttttacggctccatcttcatcaaaaagcatttgaagcaaaagactttccttttcaattctttcttttgctgatgatgaaaggttggttgtatgggttctataataagctaatttttctggaatatatgcaatataatataaagcgttaattttcagccacctgaaataatcttcaatcaataaatctgatttatatttgcctgtttcaactaagacattttttcgcattaaaacagtaagagcagcaattcggttgtttttaattaattcttttcggaataaatctttatcaatatttcctaatgtattgtaatctgcaagatcttctgtaatttctgattcttcatttacgaaataagtgtctgtgaataccattccatagtcatctcccagtcgttcaagctcattaacagatttttcaatggcttcaggatgaagataatcgtctgcagcaatcacttttacaaactccccttttacagattctatacattcattaagcattgttgccaaacctgtatttttttgatgaaaatttttttcagcaggataattattttcactaagccagttctcaaaaacttttacggaattgtcttttgaagcatcatcagctacaataagctgtatatttttataggtctgattttttatgctatcaagattttcctcaatatattttgaatgattataggaaacaacaataattgttactaaaggattttccattagaacgcatttattatatctatcaatctgaagacttcgttatccgtcattacaggagagataggtaagcttaatacttcacgatgaattttctctgtaatcggcaactgcagatgcttcattccggagtaagcttcctgatgatgaggtgggataggataatgaattaaagtctgtatcccattttcattaagatattcctgaagtccatctctattttcggttctgattacaaaaagatgataaacatgactgttttcttcaattttatgatgaggcagtataattgccggatttgctatttcggcaagatagcgattggtaatctcttttcttctgttgttttccgcatctaaatatttaagttttacagaaagcacagcagcctgaatttcgtctaatcttgaattatatccttgatactgattcacatattttttctgagaaccatagttggctaaagctcttatacattttgcaagagattcatcatggcaggaaaccgctcctccatcgcctaaagcacctaagttttttccgggataaaagctgaatcctgctgcatcgcctaaacttcctgatttttttcctttccagacagctccgatagcctgtgcattatcttctacaattttcagattgtatttctcggcaagagtttttacatcttcggagaaaactatgcttccgtataaatgaaccaaaaggatagctttggttttagaagagattttttcttctattttatgaatatcaatattatatgtttcaatatcaggttctaccaaaaccggaaccagtttgttgtctgtgatcgcaagaagtgatgcaatgtatgtattcgctggaaccaaaacttcatctccttccttcatgactcccaattctatatatgcacgaaaaattagtcttaaagcgtccaggccgttagcgacacctatcgtatgagcaacattgcaataggcagaaagctgttcttcaaaagtcttcactttgtctcctagcaaataccatccggaacggaaagtgtccagtagagctcgctcaatttcctgctgatgagcaagatttattttttgtaaatcaagaaatttaatcattgttatttttctttaaaaattttgcgggatttcccacccatatttcattatctggaatgctttttgttaccacacttccggctcctacaagagaattttccccgatcgttattcctgctaatagggttgcatttgctccaatggaagcacccttttttactagagtttttataagtttaaattctttattttttgattttggaaagagatcattcgtaaaagttacgttgggaccaataaagacatgatcttcaagggtaacaccgtcccagatctgtacaccgggttttatggtaacatgatccccaataacaacttcattttctatcagtacctgacagtttatgttacagtctttaccaataacggcatttttcagcactacacaaaattgccatattgtagtaccttcacctatattttgagtttgtacgtcagctaaagaatgtatcacttgttataatttttaaattcttcaaaatccctaaaatagtctttctcatcatacaattctgaagcaagacatagcaaaacagcgctatgagtaaattttatatctctccagatcaattttggaatatataatcccttagaaggtgtatccaatataaaagtttctttatttccttccatatctaatgtattaaactctatagttccggaaaccgcaaagatgatctgctgaagctctttatgtgcatgtcctccacgaataacgtcctgtggcgtgtagtacgtccagtagactctttttatttcaaaaggaacatttttttgttcttcagctactgtaatatatcctaaatcctgagaacctattttagaaaattctatgatatgtggaggcataattttattgttttgttaatctttttttgttccttcaattccataggaactttggactttttttccttcatcgtcaatagagtaaataatgattttctcatctcctttttctataataacctcaaaaggcacaatatttactacagttatctgctcaggaaggttgaggcgaagagtatatccttcagtaaatttctgatttaaataatcaacatcaatatttatagttggattagaattatctgttgaaactctatttaatgttgttccaactaattttgtttttaaaggactgataccgtttctgaaaagtttatgttccagcgcgtatctaaacatattttcttcaagcgttataggattatggtatggtactttttctaaaacggttaataaatatttggtattataaacagttccgtctacagaaaaaggataagaccagtgcgtaatgttcttatctgtataataatcccattggtaatagctactttttttttcaatataatttggaaacccatctatgttatcaccaacatacattctgtaagaagttgtattagggttttctctaaatacggaaataacatcattatctaaaataacatcatcataaaatactccgtcatcagtattaaacatgacaaaatcatgtttggttttttttaataagttttgtagaagacctttaaagttatctccctttttgttttttagatttttttccagaaaaaaattaaaattctttttactgttaaaagtttttaaaaaagaaatatcaaaccaaacttcctttctttcaacaaagctaatattaggatatgtcttatatttttctattaattttttataacctaaatgatgatcgcctgttgtatgatatagaataacggtgctgtaatcaggtatcttcagcctgtttagaatggtggatagaagatagtctacctgcattgcacgattgtatgaaaaaatgatatttaaaagcataaatatttaattaagaccgttaaactaaattttttttacatttgaaattatattggggaaaataacacccggcgattttcttatatcgccgaattgatttcgaattccgttaatctcaaaaccaaaggattctgttttcagtgcaatctcagaacgattgattccccagaacatttcaaaataataggaatcttcattaagaatgttaggctgaatttcaaatacaagcgaatattccccagtttcaccgttttcacttataataaatccattactcagaattgttacttcgtgtgaatttcttaaataaaaagaaagatccaatgtcgagttctgaactttactcgaaaaaataatttcaaatttagctccagaattaatatttaatacattgccatgtatcggctcaacggtgtaagacaatactttaattttgtcattctctattttaaaatcatgttctgatgcattataataagaaagatgtccacttcttttttggtattcaataatacatttgtctttatctccctgcatcaagacggtacctttatctagtaagattgcgctgttgcataattcattaatagctgccatgttgtgacttacaaaaagaacggttcttccttcgcctttcgtaacatcgcccatttttccaagacattttttctgaaattcaacatcgcctactgcaagaacttcatctacaattaaaacttcagattcaaggtgtgctgcaacggcaaatgccaatcgtacatacattcctgaagagtaccttttgacgggagtatctatatatctttcaactcctgaaaaatcaactatctcatcaaattttcgtgtgatttcttttcttgtcatcccaagaatcgctccgttaaggtaaacgttttcccgacccgtcatttccggatgaaaacctgtgcctacctccagaagagaggcaattctgccattggtataaatttttccagttgttggttttgtgactttgcttaaaagtttcagaagagtggactttcctgctccatttcttccgatgattcctacggcatcaccctgttcaatttcaaaattaatatcacgtagagaccatacataatcagattttccttttgcggttctgtcatttgcctcaccaatttttaaataaggatcttccttccctcttactttatgccaaaaacggttaaggtcatgagatagagttcctgttccgacttgtccgagacggtattgttttgatatgttttctgcttttagagcgagcatattttcttatgattaaaaatgttaaaaagatttttaaacggtatccataaaggtcttttcaatcttattgaaaattacaatacctacagccaagagtataacgatgattactgagctgattcccagcattaatggcgaaaaatctccaacgccaagccaagcatatttaaaacactcaaagattccggttaaaggattataaaaggaaagttttttaaaaccaccaggtaaagctgaggtgggatatataaccggcgtagcatacatatataagcttactccaaatcccagaagcattgtaaggtctttatatttcgtagtgagcgctgaaaagatcattcccactcccaaagcaaataatgccatcaaaataattaaaagaggagttgccaatacccaaatgtttggatgtatttcccctttcgataaataataacaccaggcaatgataaaaagtaaaaactgtacgccgaaacgcataagatttgagatcacaatagataatggagtaaccaatcttggaaaatatacttttccgaaaatactggcattgcccacaaaagttgaggatgttcctaaaaggcaggatgaaaaataattccaaagggtaactcctgccagataaaataatagtggaggtgctccatcagtcgggaggttggcaatctttccaaaaaccaccagataaacaattgtcgttaaaattggatttatgaaaaaccagattggtcctaaaatggtttgcttgaaactggaaacaaagtctctttttacaaacatatagaccaaatccttgtaccgccatacttctttaagcttcaagtcgaataaagagtgctgggtttcaatagtttctgtccacttttgctgtgggtcattcatctgtgtaaaattttaatgcaaatttatactatttaaatcattcattgttttctttattgtgaataattattcatttaaagtaacaaaatatcaactaatatattaatatttgcggttatgaacaaaaaactatcagctgtaaagctaatagttttaaaatgtattaatttagccgattatttactgactaattttttcaggtattccccataaccgctttttccgtatttggttgctgtttccagtaatttttcttcgttgatgaatttatttctgaaagcaatttcctcaatgcagccgattttaaagccttgtcttttttcaattactcttacaaattcagaagcatcatttaaagaatcaaaagttcctgtgtccagccatgctgtacccctgtcgagaacaccaacttccaattttcctttttgaagatatacgttatttacatcagtgatttccagttctcctctcgcggaaggctggatgtttttagcaatttcaactacttcgttatcgtaaaagtataatccggggacagcataatttgatttcggctgtaaaggtttttcttcgatagaaacagctttaagatcatcatcaaactctacaacgccatatctttcgggatctgaaacgtgataagcaaaaacaactcctccatccggattggttttgtttttaagtagggttcccatttctgagccgtaaaaaatgttatcgcctaataccaatgctgcagcatcatttccaataaactgatctcctaaaataaaagcctgtgcaagaccatccggacttggctgaacgacatattctatattacagccaatctgtgatccgtctcctaataattttacaaatccttcctgatcgtggggcgttgtaataattaagatatctttaattcctgctaataacaatgttgaaagcggataataaatcatcggtttatcgtaaacaggcattaactgcttgcttaccgcaatggtaagagggtaaagtctggttccggaacctccggctaaaatgatacctttcatcggttaatctgtgtttaatttttaatgatactgtttttcgtagtatttctgataatctccgcttgttacattttcaagccattctttattctcaagataccagtcgatggtttttgccaaaccttcttcaaaggttacagatggtttccatccaagatctgtattcagtttagtggcatcaatagcgtaacgcttatcgtgacctggtctgtcttttacaaaagtgattaatttttcagagtaaccttcttctctgcctaatttagcatccatttgcctgattaattcttttaccaagtcgatattctgccattcgttgaaacctccgatattatacgtttctccggttttggcttcgttgaagatctgatgaattcctttggcatgatcgatgacgaataaccagtctcttgtatatttcccgtcaccgtagataggcaaaggtttttcattgatgatatttgaaatacaaagaggaatcagtttttcgggaaaatgattcggaccgtaattatttgaacagttcgaaataataaacggcattccgtatgtgtttccgtaagctctcaccaaatggtctgaagctgcttttgaagccgaatacggagactgtggatcatatgctgtagtttctaagaaaaaacctgtttcgcctaaacttccatatacttcgtctgtagaaacatggtagaaaagattcgttctcttctcatccgggaatcttccatgcgtatgatccggatttaacgtccagaattccttgcaaagattcagaaggttagcggttccgttcacgttggtattaataaatgccatcggatttgtaatgcttcgatctacatgactttcagccgctaaatgcacaacagcatctggattgtacttttcaaagacttttctaagttcttcaggttttgtaatgtcggctttttcgaaaacgtaattaggttcgttttcgatgtccttcaggttttccagatttcctgcatacgtaagtgcatcaaggttgatgatcgttgtttcaggattattttttacaaattctcttaccacgtgcgagccgataaagccggctcctcccgtaatgattatatttttcattttgctgttttaaaaacaaagtttagtgtcaaagatattaaaagtataattaaaataagaaacggacagtaccaaacaaaaaaatcaatgtgcttatggatgtgtgcgtgctctttaaataatataaaccaactgaagggtgcggcaatggaaaaccatgttacagcgaccaatcttctttctctcttttttataaataatatcacagaagaaataattcctgcaataataagaatcaaaaaaggaacctttacgaaagtaagatcttcattaataaaagaatttcccacgtaccttgtaataatgtccaaatggtattttttcagttgattcaggtagctgaatttttcttcgtaaaagtaatctccgcttgatcttcttgagtaggcgtctgctaaatgtaagatccctgctttaaagcttcctgccaaaagtttaaattggtacaattgaaataaaacagataataacagtggaattattgttatgataaaatgccttttgatgaactgaacataaaaagaaagtttattttcgaatatataatataaataaggtatcgaagaacctatcagaaagacggtaataaattcaaaacctgtaaaccagaattttataaaaaataaggttgagaaaacgatgatatattttctgaaattcgcggatttatatttttcaaaaaagaaaagaccatatacaaaaggtaaaaagtaaacccagttgcaccaccatgtactctttccgtaaagaaaaatccagtaattaacaagaatcaggaaaaaagatataactgaagtcataactccaaattttctttttacccagactaaaaataaggcgagaagaatgcttaatgataaagaattaaacattctgaaaatttccaaatttattttgttatctaagtagaaaaccttatcaaaaatactgtataaaattgcctgaccaccaatctgtgacttgtaggcatcgtaactgtattttgttggaactttattgttaatataggcttcataggctttttttccgccagtttttctccccgaaatgtaatctgagtaataagtgccggtaaatccaccgtcatcgaaaaccgatccgtgttgggaatttaaaagttttcctataaccagtgtttctgattcttcaagcttgctgtattcaaatttttcacgagggatcagatgaaaaagattgaactggatattcagaaaaaagataatggtaaaaagaagaaaaataaatttttctttcatcgtgttactttgtgttgttatatcttactttaaaattttttttatcaataatactgatgttgtccaagataagtcctgttgtaaatgcaagcaaagcgacgatcgtcaacatgatagaaaatatcagcgtcggaactttgtaaacatatttatattcaaaatattctctgatgggaacaatcataaaaatgataccgataataaagagaataatagaaacggagccaaaaaataaaagtggtttatacagtcttaccaagttaaaaaacagtttgatgactttaaaaccatcagtaaaagtattcagtttagaaacacttccttcaggtctgtcccggtaattaatagaatattcttcaatcgtcagtccgtaatttaaagaatatacggagagatctgtttccagctcaaaaccttttatcgaacttgaataattttttacaaattttttggagaaaattctgtaaccagataaaatatccttcaactcagatccgaaaaaaacattgatgagatttcttaccagattgtttccgaaattatgaaaagctcttttgttttcttttctgtaactgttattggaaagtctgtcgcctactaacatatcgcaattattctcaataaactgctccaccatttcctgagcgcattctacaggataagtatcgtcaccgtctatcataatgtaaagatccgcgtctatttctctgaacattttaaagacaacatttgcttttccctgacgtttttcctgtcttacaatagctccggcttcttttgcgatggcaatcgtttcatctttggaattattatcatatacataaatatctgcattgggaagatatgttttaaaatcccggaccacttttccaatggttaaagcctcattatagcagggaacaagtacagctattttatgagactccatttgcagaaactgttttacgtcctatacttttataataaaaaccattctgctcaggaatttccagcggatacatatttcttccgtcgaaaattaccttattgttcattctctttgccatcagttcgaaattcgggtttttgaattccggccattctgttgcaataaacaaagcatctgcattgtccagagcttcgtacatattctttgcgtattggattttatctcctaacaacttctgaacattattttcggcaaccagatcataagcaacaatttttgcccccttttctaaaagcaacgcaatattatctaatgaagaagcttcacgaatatcatcggtgttcgctttgaaggctaatccccacattgcgatcgtttttccttcgatatttcctccgaaatacttttcaatctccgaaacaaggattactttttgggcaatatttacattttctgtcgcttctaaaatctgaaaattaaaatcttcctgctttccggattttatcaatgctttcacgtccttcggaaaacagcttcctccatatcctatgcccgggaataaaaacctatgcccgattctgtcgtcacttcccattccaagccttactttgtctacatcagcgcctactttttcacagtaattggcaatttcattcatgaacgtaatttttactgccaagaatgaattggctgcgtattttgtaagttcagaagatttttcgtccataaaaataataggaactccggtgttggtgaatggctgataaattttagccataatttcctgtgctttttcggagcttgctcctacaacaacccttgccggattcatagaatcctctacggcaaaaccttcccttaagaattcaggattggaaaccacgtcaaaaggaatctgcgtttttgaagcgataacttcacgtactttatcggctgttcctacgggaacggtacttttattaacaataactttatattccgtcatcatttcgccaatatcgttcgccaccttcagcacataagaaagatctgcagatccgtcttctccaggcggagtaggcaatgctaaataaataacttcgcttttatccaaagcttcttttaaattggtagtgaaaaataatctttcagcctgtatgtttctcaggaacatttcttcaagattcggctcatagatgggaactacgccgtttttcataccttctacttttttttcatcaatatctacacagtatactgaattgccaagttctgccaaagtggttcctgtaaccagtcctacataacctgttcctacaatggtaatattcaaaatgtatgtttttaaaaaattcaaccacaaaaatactaaaaataccatcacgcccgtctttaatttcccgtaaatgaacaatacatatcctgttgataataagatgttttgcttttttaataaaaattcgtatatttgcagtggatttacggaaaaaatgggaaggccttcgcaagaaagccttttttcgtaccgtacatcaggattttatatattttatggagtttagaaaaagaattgaagaattattacatgaattcctcgagaccagaaaagatttattcctaatcgatttaaagatttctgcgggggatgacatcaccgtgattttggatggtgacaacggtgtttctttacaggactgccttgatgcaagccgcgcgattgaatttaatatggatcgggaagagcatgatttcagcttacaggtaatgtctgcgggattaagcgagcctttggcaactccgagacagtttgcaaaaaatatcggaagagaaattgaggttttactgaatgactctaccaaaacggaaggcgaactggcaaaagtagatgaagaaaagatcacactcatcctgcgttaccgcaagccgaaagacatcggtaaaggaaaagtggatgtggaggaggaaaaagaaattccgtactctgagattaagaaagcattagtaacaattaaattttaaaagaaaaaagaataaatggacaatatagcgttgattgaatccttcggtgattttaaagacgaaaaagggatcagtaagattgatcttatggcaattattgaagattctctgaagacacttttgagaaagagatatgattcggatgatcattttgatgtgattgtaaaccctgataaaggagattttcagatatttttaaataaaacgatcgtggaggacgaaatgtctgaagatgatgatttggaaatcgagatctctgaagctaagaaaattgaccctacttttgaagtgggagaagattttacgatggaaattcctgttgcacagttgggaagaagaaatattcttaccttaaagcagatcttggctacaaaattgcaggagcacaacaatgcgatgttgtacgagcagtttaaagacagaatcggggagattgtagtaggagagatccaccatatccgtcataagcacgtgattttgctggatgatgaggggaacgaattcattttgcctaaagaaaatcagattccatccgatttctttaaaaagggtgagaatatcagagctattgttgaaacagtagatttcaaaggttcaaaaccgcagattattatttccagaactgcacctaaattcttagaaaaactattagagctggaaatccctgaaattcaggacggaactattatgcttaagaaagtagtaagaattcctggagaaaaggcgaagattgcagtagatgcttacgacgacagaatagatccggtaggagcttgtgtaggggtaaaaggatccagaattcacggcgtggtaagagagttgagaaatgagaacatcgatgttattcagtggtctaaaaaccctgagattttggtgaagagagctttaggaaatgttaccatcaataaaattgacatcaacgaggagcaggaatatgctttagtatacactccggttgaagagatttctaaggtaatcggaaaacagggtcagaatatcagacttgcttcttggttgacaggttatgagattgatgtgcatagagaatccagcgaagatgatgatgttgagcttacagagttcaatgacgatatcgagcagtggattttggatgaatttaagaaagtaggtcttactactgcaaaatcagttttagacaaggaaactgtaagcttactgaatatggttgaccttgaagaggaaacgattgaagaagtgaaacgtattctgagagaagaattcgaagattaagatttgtaaataaattttaataaacagtaaaaaagaaatactttaattttaagaattaaaaaaatagtaaataatatagatgccaaaaattagattaaataaagcggttaaggaattcaatatttcgatgtccagattagtagaatttttacaagctaagggtatcgaggttgaaagcaatcctaacgctcaattagaagaagcggcatattctgcattggaggctgagtttgccaaggacggcgagcaacgtaaagcttcccatgaggtggtgatcacgaaagttccggaagaaaagctggaaattgaagaaaagaaaacccctgaagtaataagagctaaagctaacaaaccggaaactaaaattttaggtaaaatagatttagaacctaaaaaacctgaagttgaagaagttccggctccaaaaccgcaacctgtggtggaagagaaaaaagaagaagttgcgcctgctcctgaagtaaaagcaactcctgaaaagcaggaatttaaagttttggataaaatagatctttcccagatcgaatccagaaacagacctgtgaaaaaagataaaccaaaagcggaagagaaaaaagaagaagaaaaacctgtggctaaacctgcagaacctgtaaaagaaactccgcaacctgttgttgctgaaaaacctgttgcaaaacccgttgaagaaaaaacggctgaacctgcaaaagcagaagaggaatctcaggaaccacaaaaaattgaaacggtttatcaaaaacttgatggtcctaaaattgttggagaaaaaatcgatttaactcagtttgctcctaaacctggagcgggagctaaaaagaaaagaaagagaattgagaaaccgggcggaggaaatcagcagggtggaaacaataaccaacaaggaggaaataatcagggacaaggaaaccgtccacaaggacagggaggtcaaggtggaaaccgttttggaaataaccagggcggacaaggaaatcgtccacaaggtcagggtggacaaggaaaccgtcctcaaggacagggaggtcaaggtggaaaccgttttggaaataaccaaggcggacaaggaagccgtcctcaaggtcagggtggacaaggtggaaacagaggtggattcaacagaagcggacaaggaggtaacagaccgggtcaaagaacaatgcctgttgagttaactgacgaacaagttaaaaaccagatcaaggaaacccttgaaaaattaaccaataaaggaggtaaatctaaatctgccaaacacagaaaagataaaagaaacttccgtagagaacaggacgagcgtcagcaggaaattgatgcggcagacagaacactaaaagtaacggaattcatcacggttggtgaattggcaagtttaatgaatgtgtctcctacagaagtaatttctgcttgtttctcattaggtgtaatggttaccatgaaccaaaggctggaagcagataccttattattggtagctgatgaatttggttataaaatagaattctctgatgcggatcttgaagattcagattctgaagatgaaattgataatgaagaagatcttcttccaagagctccgattgtaacggtaatgggtcacgtagaccacggtaaaacttcattactggattacatcagaaaaaccaatgtaatcgctggtgaatcaggagggattactcagcacatcggtgcttataacgtgaaactggaaaatggacaaagaattacattcttagatacaccgggtcacgaagcctttaccgcgatgagggcgagaggtgcacaggttaccgatattgcaattatcgtaattgctgcggatgatgatgtaatgcctcagaccaaagaagcaatctctcacgcacaggcagcaggagttccaatgattattgcaatcaataaggttgataagccgaatgcgaatcctgataacatccgtcagcagctttccggaatgaatattttggtagaagaatggggaggaaatgttcaggcgcaggaaatttcagctaaatttggtaacaatgtcgatgtattgcttgaaaaagttttattacaggctgaattacttgaattaaaggcaaatcctgatcgtgctgcaaacggagtagttattgaagcttctctggataaaggtagaggttatgtagcaactatgttggtacaaaccggaactttaagagttggagattatgtggtagctggtaaaaaccatggtaaagtaaaagctttgcttgacgaaagaggtaaaaatctttcagaagcaggtccttcaatcccggcaactattttaggtctggacggagcgccaacagctggagacaaattccgtgtttacgctgatgaaagtgaaggtaaggcgattgccaacaagagagagcagcttcagagagagctttccatcagaaccaaaaaacatacgacgcttgaagaattgggtagacgtattgctttaggagaattcaaggaattgaatattatcctaaaaggtgacgtggatggttcggtagaagcattgtctgatcagttacagagattatcaacagaagagatcagcgttaaaatccttcactcaggggttggacagatcacagaatctgatatcaacttagcggcagcatctgatgcaattattatcggattcaacgtaagagctggagccaatgctaaagatcttgcagaccgtgaagaaattgagatcagaacttattctgtaatctataaagcgattgatgaggtaaaagaagcgatggaaggaatgctttctcctgaaattcaggagcaggttatcggtaatgttgaaattcgtgaagtattcaaaatttctaaagtgggaaccattgcaggttgtatggttcttaccggaaaagttaccagacagtctaaagtacgtttgctaagagatggtatcgtgaaattcgatggtgaacttgaaagtttaaaacgtttcaaagatgacgtaaaagaagtaaccaaaggttacgagtgcggattgaacctgaaaggatacaacgatatcgaacaaggcgacattcttgaagtttatgaagaagttgctgtgaagaagaagttaaaatagtaatattttatctatatgagacaataatccgactcaatttgagtcggattattttttttatttataattagtctaaattatttgattatggtatgctttaaaatgttaaatttttatttgttaaacaaataaccataataataaatcaattttaaatcaaaaaaataaaatacttatgctaagcttttattttttttaatgattttttagattaaataaattataaaaagttaaaaatttgttaatgttaaaatttattaacatatttgcttttgttaaatattaaacttgttaatatgaatgtgaaattacgtgtattaagcgcgggagtccttttttttattggaggaacagctatagcgcaaaaaacaaagaaagatactgtaaaggaacaacagatcgaagaagtagtaatggttggttttgggcaaaagaaaaccgttacagaactaactggagctgtaggtactattaaggctgacgcaattgaaaatgtgcctgttgcatcaattgataaaatgttgcagggtagagtttctggggtacaaactggtaatgcctcaggacagcctggaggatttgcaaccgttagggtaagaggtatttcctctgtcaatggtggagttaatcctatttatatagttgatggagtaagagtcgttgccggagatttaaccagaagtgcaattaccgcaaatgctttagccaatctaaataccgatgatattgaaagtatgactgttctgaaagatgctgcatcaacagctgtttatggagcagacgcaggagcgggtgttgttattattacaactaaatccggtaaaaaaggaaagccaaaaatcaatatcaattttgaacatggtactaactctagagcaatagaaggacaaagaggtttaaatactgaacaatacagatacttattatcatacacgtttgctaataatcctgctgctttaggcgaagcagctggttttactcctcaacaatttattaccaatgcaattagcggaaagtatggtacggatcttcagaatatttataccacagcaaataatacggactggagaaaagctttaagcagatctgcttatcaacagtcaatcaatgcttcaattagtggtggtaatgataaagttacatactataactcagcgagttatttcttgcaggaaagtgaaattaaggggtctgattttaaaagaatggctttcacaagtaaagtaaattatgatgcctctgaaagactgaaaataggttctgatgttcagatggcgtacagtaaaataaatactttgaataacggaggggctttttcaaatcctatattgacagaattgtttgccagaccaactgatgctgcatataatgcagatggaagctataacttaggtgttgcaggtaggttgagtaataatttgtttaataatgcttatttggctgatcacaattattatagagctgaaacagcaagaatattcgcaaatgtaaatgcagactataagattctaaagaatttgaattatagattcgttctaggtggagaatttttaaatatagaaaacaatacttatttaaatccaatccatggtgacggatatcaggtaaatggtagaaaaacagaatctattgaaaggttttttaactggaatttacagaacgtattaagctataatttcaaagtaggtgacaaaaatagctttgatttacgtttaattcaggaagcatatcaaagacaaaatcacgctgttggcgcaagtgcaacttcagtgggttctcctacattagaatcattaagcaactttgttaaacctgcttcatttttaggagaaagaggtaaaagctcaagaacaggatatgcagctacgatcaattacaactacgatagacttgtaacgttagatgctgcttacaggagagatgcactttctaattttacacctgatcaaaaatggggcgatttttattcagttggtttagcggttgatttagcaagaataaactttgtaaaaagtttagataaaatctctttatttaaattaagagcttcatatggtaaggttggaaatcaaatttcaagtagcccttactcactttattcatttacaacaaattataatgatttggctgcagcaacatatggaggtgtatataatcctgatttaagatgggaaacaattaatccactaagtgtaggtatagatgccggcttgtttaagaatagattgacatttacagttgaatactataacaaagaaactaaagacttagtgtttgcacagcctctttcattggcgcagggattagcttcgatggatagaaatataggatctttagtaaacaaaggtttagaattagcagttaatggagaaattataaataacgataatttatattggtcattagggggtaatttcagtacactgaaaaataaaattacatcactttacggaggacaggatataatttcaggttctacaattttaagagaaggtgaagctgttggtacttattacatgagaaaatgggctggtgttgatccttcaaacggaaatgcactttggtataaaaatggagtagatggagaaacaacatcaaattataatgatgcgcaattagctgttcagggtagtaattttgcaaaatattatggaggagtaaatacaagagtaatgtataaaggtttttcgttagaagctttagctacttttggttttggaggtaaagtgattaatgattgggcaaactatacacagtcagacggacaatatagttataattatgctggtagtacagatcagctcgacttctggactcctcagaatcctaatgcagcgaatccaaaacctatttataataattcaactttgtcaaatagagtttcaacaagatttttatcaaagacggactatttgagattaagtaatatcaaaattggatataaatttagcgcagaaatgctaaaaggtacagggatgaatggttttgaagtatatgtgcaaggaaataatatttggactcatttatatgatgatactttaagatttgatcctgaaaataatttgaatacaacaaataatcttaatttaccaattcaaaagacttattctttaggctttaatctgcaattttaaataacttaaaaaaatgaaaaataatatattaaaatatgcatttgtatgcttgtctgtaggtactttaatgacatcttgcagcaatgattttatcgagacggaattttttcaatctatcgaacaaagacctttggtttcgattgaagagatggaatccacggttcgaggacaatataatgctatgagaaatgcttcgtattacggttgtgattttccaatgattgcggaaattagaagtgataatatgttttcaaataatgccagtggttattataatacagtgagtaattactcaatgttatctaatgatacatatgcctctggaccatatactcaaatgtatagagttattgctttagcaaatactgttatcaataatcagcctgcttcaccacttacgtggaaagtaagttctgatgctgcagctattaccgctaaagctaactatttgaaagggcaatcttatgcagcaagagctttagctttatttgatgcattaagactttatggtcaggagtatgctggaggaacccttggagttgtagttcctacaaaatatgatcctacatcattgcaagcaagatcatcagtcgcgcaaacgcgtactcaaattgagagtgatttcgatcaggctttggtcttaatgagtccatctttagatgcgacagacaaaacagtattaaatacattatcagtaaagactctaatgtccagatattatctttacaaaggagattacgctagagtgagaactcttgttaatgaaattgttgcggctaacaaatattccgttattggaagaggagattatgcaaatagctttagaagtaattctgctcaaaattctatgttcgaattagcggtgggtacattgggtgacttgggaacaacttcaacatcctataaattattaacggctccaaatggatatggtaacatgaaggttttgtctgcattaagagcatcttataatgcaaatgatattagattggctggtattactacagggcttgttttgaatgggaaatacataaatacatttgataacatcaaactagttaggtatgaagaagcgcttttaaatggagctgaagcagaattaaatgctggtggtacaccaagtaaagcggtaacatattataatcttattttacaaaatagaattttaaattatgttccagttactagtgtaactcttaatgatatttatcaagaaaagaagaaagagtttgtaggagaaggttttggtatgtttgatctattaagaagaggtcaaccaattacacagagaagtacttctggtgctgcaggtacggtgagaaatgttggaaataatttattagctttccctattccacgtgcagaaataaatgttccgggtacacccgtagtgcaaaatcctggatattctaattaattgtttaattaaatacataatcaaccccgcaattcaagcggggttttttattccctattatttcttatttttgctttacaataaaaataaatgaaatacctattttccatcatatttttcctgagcgtggcagctcaagcccaggtcgtcaacaaaacagacttcaataagcttcccaaagataaagacacgctcgttatcgattccggaaaaaaagactctttaaaaatatttaaaccaactattaatgattatctctatcagaagcagttttctgaaaagaaagtctttgatacggtaatgactttcgataaaacgtatattttttctcagtataacaataaagataactttggaagagcgcaggtcgcaaacataggggcaggatttaatccgcttacgtacgaagtgaatgccgaacaaaatttagcactattaccaaccaacaaatcatattggattttaggcgttaatgacatcaattactatgacgtaaaaacccccaccgcaaccttcatttatcataatgcaatgaaaaacggagcggctttaagatcttcttatacacagaatattgggaaaagatttaatttttctctggaatacagcggattgcgttctcagggaatgtacagaaattcattggcatccaataacaatactttgtttacaggacattacgtctcaaaaagcggaaattatgaattgtttgcacactatcttcatcagaatgtgaacaatcaggaaaatggaggaattgcagtagacagtttatttcaaaacggcgacagcaattcaagaaacagacagaatatgcaggtgaatcttacatcttcaagctcacagtattcctacagaagatattatttaacccatcagtttgccccttttaaatcagaaaaaattccttttaaaataagacataccatttctcatcagggaaacaaatattactatgcccagagtacggcagaaacttactggtacgacgctccggatgaactggtgacaggagctccgcttacttcaaaaaaatattcagacaacttcagcaatacggtaagtctggtttgggacaatgagaaatttaaacttgatgctggtctccgttaccagatgctgaaatttggctcgaatgaaattacacttccgattttagtgattcctacggaaattaaagaaagccgaatcggggcaatcggaaacctacagattaaactgttcgacaaaattcagttgaattcatttttggaattttctaacggaagccagtttggaacctatttaaaaacgacaaacaaccttaaattcgaaccggtaaaagattactttgtgaatgcaaaagtaaactttcaaagtgcatatccatcatttaattatctgttgaatacttccgtgtataataactacaactattattttcagaacgcacaaaaccaaaccgtctcagaaattggaggaagtgttggtttaaagtggttcaaaacagaattgttcgcaaactatttcagaatagataattatacatactttgatgcaattgccatgcctcagcaaagcggaagtcccgttaatatttcgcagatcggaggtgacgctacttttagctacggtaaatttcatttaaatacaagactgcacttccagaacgttttaaccaacaaagatttgcttccgctaccaagttttataggtcgtgccaatttcttcttccagtccaaagcctttaaaaatgcggcagaaattcagaccggaattaaagtatattatttttcgaaatttgcatctcgggaatttttccctattcttaacgaatatattttgccgggttccaattcattttctatcggaggacagccgattgccgatgtttacttcaacctgaaagttaaaaaaatgttcttttttatcgaaggacaacaggtcggaactttcctttctaacaacaaagcatatgcatttccaagttatccggtctacgattttaggctgaatctgggaattgtatggtatttgttcaactaaaatatataccaagttgaaaactataaaaaaaatatcttttcaggatatccaaagcatccctcagttaatcaaagattttttaaatcatgaaattgagggatttgaagaaaaaacattttctttagaccattttaagaaacagatcgcgcagaaacagaattctttcacggcggatcagagaaatattttagcaagcaatttagaaaggcagcttgcccatcttgaactttcttcaaggcagaacgaaaatatagatcatttaagactttccaataccttcaccatcaccaccggtcatcagttgaatctcttttcaggacccgttttttttatatacaagattttacagaccattaaaacctgtacttacttaaaagaaaattttcctgaatttaattttgtccctgtatactggatggcttccgaagatcatgattttgcggaaattaatcactttaaaaccgagaacagtttttatgagatcaacgaaaaatcaggcggtccggttggaagaatagaaattaacgatacatttttcatatctgaatttgaaaaagaattcaaagactatgtttttgggacggaactgattttaatgctgaaagaagcttataaatccgggcatacattaactcaggcaatccagattttagtcaacagactgttttcagattttggcttactgattttggatggtgattctaaagctcttaaaaatcagatcaaagaaacctttaaagatgaactgctgaatttcagcttatataaaaattcacaagaaaaagtagatttcttaactcgtaaatacggaaaagttcaggtaaatccgcgcgaaattaatttattctacctttcggacacgagagacagaatagattttgacggtcagaaatactttgtggtagataaaaatattcagtttaccaaagaagaaattttaaatgaacttgaaaattctccggaaaaatttagtccgaatgctctgatgcgtccggtttatcaggaaacaattcttcctaaccttgcttacattggaggaaatgcagaaatcatgtattggctggaactcaaagattacttttcaaaaataaatattcctttcccgatcctgattccccgaaattccatgctgtttttaaaagaaaaaacactcgggaaaatagaaaaactgaatctgaatgtagaagatttcttccagaactttacgacggtcatcaacaataaaatgctggaagataattccattctggaaatgttggaacaaaaggaaaatacacttatcagtcagtttgccgaacttaaaaatatcgccgaaacaaccgaaaaatctttcggaaatatggtgaaagccgaagaaataagacagttgaaatcatttaaaagaatgaaaaaacgtcttcttcatgcagaaaagattaaaaaaagcgaattgatggaaagactggaaaaactgtttttagatgtaaatccttctaagaattggcaggaaagagtttataattttagcgtattttttgcagatcatggatatcagtggttagatttttgtttagaaaaaatagaaatagaaaagtcagaatttattattattgcttattaaggataaagaatctattattgcgttttaaaaataaatgaaatgatgcagaaaaattcttctttttcgtctacaaaaaagatgttctgaaattcttaggataataattcttaaaccgaaagatctattattcggagcataacgaagaaattcaattctatcccaaagtaacactctgaatgttaacagaaagtcttttcaaaaccaataattattgtcatttaattttaaagaagtatttttgcatttataatcaccgaatatgataaagaggttttttattctatccagtttatgtatggttttgggtatgtctgcccagaaatcgcacaccgttgtaaaaggagatactccttataacattgctaaaaaatacggacttactgtagaagaattgctaaaactaaatcctaaagtgaaggacggtaaattggcgcttggagatgttcttacagtaaaaaatgataaagcagctcctgcttcatcaaaaacacctgctgcttcaaagcctgtaaataattctcagcttggaaaaattattcttcagccaaaacaaaccatctacggaatcacaaaacaatacagaatatccgaaacagacctcagaaaactgaatcctgaactggatgctcacatgaagatcggagatgaagttaccctgcctcttgaaagcattaaaaaatatggcggagaacagagtattgccgtacatacttctccggtagaaaaaactgttgaaactgttgctgaaactcacaccacaaaagcttcggaagacgaatatattgtacagcagaaagacaattactacagaatttcaagacagttcaatattacaaaagaagaattgtttgccctgaatcccggattggaagaaaaaggattaaaaccgggggaaacaattaaaataaaaaaagcaggaacaaaaaattccggagctgatatttttgaagaaaattcaaatccgaaaaccaaagtagattcagggaatgaaaaatcttcatcgaacacggtttcttcggaagacgattatgtaacctatactgttcagcagggagataccgttttctcgattgtgaataaatttggagttacaatagatgaactgattgcgctgaatcctgaactttccaaaggactgaaaacaggaatggttttaaaaattaaaaaactggatcctgcctatgtaaagaaaaacggtgatgcgttaagcgttgtaatgatgcttccttttggctacagtaccggagaaacacaataccgtacaatggctttggattttcttacgggggcaaaacttgccattgaaagaaatgccagaaacggacagaaattagatataaaaattgtggattccggaaacgaagcttcattccgaaattcattaacccagataaatccggataatacagacttaattatcggtccgttcttcaagtcgaacgttgtagatgttctggacttcacgaaaaaccagaaaatcccgattgttgcaccatttgcaaactctccggaattgtacaactacagcaacctgattattgtggaaaccaacgatcagacctatgccgataaaattgtagaagaagtaaaatctgcattctcggatcagaaaatttatgtggttgccgattccaaaaaagaaaatgccaactacattaaagctggtcttgaaaaaacgcttaaaaatccaaacatcaccatcgtaaattcatcagcggatattcagcttgataagaatatgatgacaggacagtctgctccggtgatcgcgattttagcaagtgatagtgattcggcaggtgaagctttcgccaacagaataatcgctttatccaaagaagttcagggagtaaaagctttcagtatgcattatgctccggttttcgagaaaaaagtagatgatcttagccaggcaaatcttgtctatttaatggacagaaagatcaatacagaaggaagttttgaaaaagaaattcttgccgcttataaaaataaatactgtaaaacacctccaaagtttgccatcgtaggttttgatattgtgaatgatatgctgaccagagaaaacaaaaaaggagaaattttcaaacagatgaataaggtacagacccagcttgccacaaaatttgagtttgtaaagtccaaagcaaacggagcctatgtaaacacagggtaccgcgttataagattggttccttaatcatttgattgtgttttaaagaatattgttaacattataattatatttgcataatattttaaattaatacatgaaagcacttgtatttccagggcagggttctcagttcgtaggaatgggaaaagaattgtacgattctagaaaagacatcaaagatctgatggaatctgccaacgaaattttagggtttgatatcctttcaatgatgttcagaggaacggatgaagatcttaaaaaaacggaggttacccagccttcaatttttatccactcggttgctgccctgaaagcagtaaacggtcttggagctgaaatggttgcaggacattctttaggagaattttcagcattggttgccaatggagttttatcttttgacgacggtctgaaactggtttccgaaagagcaaaagcaatgcaggaagcctgtgatgccaatccaagttctatggcagctattttaggactggaagatgctaaagtggaagaaatctgtgcagcaatcagcggagttgttgttcccgcaaattataactgtcccggacagttggttatttccggcgaaacagcatctgtagaagaagcttgtgcaaagctgaaagaagcaggagcaaaaagagccttattattgcctgtaaacggagcatttcattctccattgatgcagccggcgcaggaaagattggccgcggcaatagaaaaaacaaaattcagaaaagcaaccattccggtataccagaatattaccaccactgcaatttctgatcctgaagaaattaagaaaaacctaattgcacagcttacaggtcctgtaaaatggacgcagtctgttcagaatatgattaaagacggtgccaataacttcgtggaagtaggacctggaaaaacattacagggacttatcaaaaaaattgattcttctgtagatgtagcttctgcaatctaattaaataaaaatcatgggcgagatattttcaccgggaaagctgatgcttacttcagaatatttcgcaatggacggagctcttgtcttagcggtacctaccaagctgggacaagagttttcttttgaagaaattcaagatgaaaaatctctcattttctgggaagcctatcatcagaataaattatggctgaaagctgtcatcgattatcagaactggcagattttagaaaccaatattccggcaagtgctgaatttattttaaagacattaaaaaatgttcagtcactttctgctattacattaaaaaataattttacttaccatttaaagaccaaccttcagtttcctgcggattacggacttggaagcagctctactttaatgaccaatcttgcggagtgggcggagatcgatccgttttatttaaataagatcagtctgggcggaagcggatacgatattgctgtggcaaaagagaaatcagcggttctgtatcaaagtgttcctgaaattaaatatgagaaggtaaattttaatcctccttttaaagatgaattgatttttattcatttaaatcataaacaagacagtcgcgaaggaattaatttttacaagtctaaaaccaggtctcaaaaaaaggttgatgaattttcggatattacaagaaatattttactatgcaatgaattggaaaatttttctgaactaatgttgattcatgagcaaaaaatatcgaattttcttgaaattcctacagttaaggctaaattttttccagattgccctgtttttgtcaaaagtttgggagcttggggaggagattttgtaatgagctcaaaatttgatggctttaaggactatttttggggaaaaggttttcacacaattttcgaatggtctgaaataattgcttgattttcaattttttacaaggtttattttttatttgtcattctgacttatatcattatatttaaccacctttaacaattaattaatatttaattttgttatacccaaaaaagaaatagaaaatataagtaaaatgaaacacgctaaaatcatccaagatttagaaaaattagggattaaaggaaattacgaagtagtgtacaatccgtcttacgaagaattgtatcaggctgaagtttctcctgaaaatcagggctttgagaaagctgagcttacggaatctggtgcagtatcagtaaaaacaggaattttcacaggtcgttctcctaaagacaggtacatagttcaggatgatgttacaagagaaaccattttctgggacggaaaagtaaacttgccgactactccggaaatttttgcgtcttgtaaagatttagtgctgaaccaacttgctgctgcaaagaaaatttatgtagtagatgctttctgcggaaccaatgcagatacgagactaaaagtgaggttcatcgttgaagtagcgtggcaggcacatttcgttaccaatatgtttatccgtccttctcattatgagctggaaaactttggtgagccggattttaccgtaatcaatggttctaaaacaacgaatccaaactgggaagcacaggaactgaattctgaaaacttcgttatgttcaaccttactgaaaaacttcagattatcggaggaacatggtacggcggagaaatgaaaaaaggaatgttcgcaatgatgaactattaccttccgctgaaaggaatggcttcaatgcactgttctgcaaacgtaggagaagaaggagacgtagctcttttcttcggactttcaggaacaggaaaaacaactttgtctgcagatcctaaaagatatctgatcggagacgacgaacacggttgggataacaacggagttttcaactatgaaggaggttgctacgcaaaagtaatcgatctttcggaagaaaaagaaccggatattttcagagccattaaaagagatgcgcttttggaaaacgttgtcgtaaacaatggtgtttcagattatacagatggatcaattacagaaaatacaagagtttcttatcctatttatcatatcaataaaattgttctgccttcaaaagcaggacacgcaaaaaagatcgtttatctttcagcagatgctttcggagtattgcctccggtttctattctggatgaagatcaggcacaataccatttcctttgcgggtatacatcgaaattagcgggaactgaaagaggaattacctctccggaaccgtctttctctcctgcattcggggaagctttcttaacattgcacccaacaatgtactctaaaacattaatcgggaaaatgaaagaacacggtgcaaaagcatatctggtaaacacaggctggaacggaacaggaaagagaatttctctgaaagatacaagagccattatcgatgcgatcatcgacggatctatcgaaaatgctccgaaaacaagaattccgattatgaatctggaagttcctacagcattgccaaatgtttcagaaggaatcttagatccgagaaatacttataatgatgcttctgaatgggaagaaaaagcaaaagacttagcttcaagatacattaaaaactttgagcagtactgtaacaccgaagaaggtaaaaaattaattccttccggtcctcagttacaagagcagacaaccaactaaaaataaaaaatcctcatcgtgcgatgaggatttttttatttgtattcctgaaaatttctcgggaaattatttcagacttaaaacagccagtctgtagccttccatcccgaaaccggataaaacagcatccgtatttgccgcagttacagatttctggcggaattcttctcttttgtaaatattgctgatgtgaacctcaacttttggttttgggatattctttaaacaatctgcaatggcataagaataatgcgtaaaagctcccggattaataatcagggcatcaaattcatctttctggagctgattgataatttcaccctcgatattagactgataatattccagttgatgggagggaaaatcggtttttagacgatccagataatcctccatggaaactgttccgtaaatttctggctctcgggttcctaataaattcagattgggaccattcacgataagaattttcattgaaaataatttattcaaagatagcacattttaaaaacacaattaaatggtatttttaagatgtttctggaaatattccgaaggcgttatcccttcaatctgtttaaaagcacggttaaaagtcgactggttcgaaaaaccggcttccgtatatacatacatcagggttgatttttgaaaatcgatttcagtgaataactttttcacataacttactctgcatgtattcagataactgttaaaattaggatatcctttgtaacggattgcttttgaaatataactgctgttaacttccaatgcaacactcaacgcagaaaggttgaatttcatatccttaaataacagtttttcattcatggaaatttcaattctggaaaaaagtttttccatactctctatgttttcggcagtactttcggcagagatatccgctgtttttttatcctctgcaattattatctcttctgttttctcaaattccgaaagaatttccagccttcttattttgtctttataataaataagcagcgtaactactaaaatattagaaataatgatgataatatctgtaaacaaaaccgttttttgggtccgttcaggaaattccagattgaaatttgcggtaataaaataacaggctaaaataataagtacggtataaagcgtgtaaagaaaaacctctttttttgtaaagaaaatgtaggctccgataggaattggcagataccagcaaaaacttaccacagaataatcccaaaataccagtacaatatagatattgaaaagaggcgcaattaaaagatgaagatgaacaattgtagattgtttaaatcttcctctcatcagaaaataagtgtatcccagaaaaaataatgccgatcccaaataccagataagaaaattatcataagtataaaatgtaaagataaaaatataaaaagctaaaatgacaagcatgagaatcacatacctgtccatgagttcctgtttcagtttttcaatttgttcaaattttgtactcatttgtattttacttcatttttacaagtttaagcaggcattttcaataaatgacttttttaaagtattgatatgtaggcaaatataatcattataaatcattttcagaattatgatttgcatagctctttttttgatttatcagaggaaataactttgcaaaacaatttttaactaaaaaatgtacaagatcaatgcttctaaaaatagggcatttttgtgacaaggtgatgaagatctttttttatttattacaaacaaaaagaacaatagagttcaaaattagagaaaataaattgataatgaatattaattaaacacgtcattccgatttttcataaagtcagtatataaagaatatttaatctgcataaaaaataaacagatcaatcagagtctataaattctaaaaacaacaaatgaagcaaaactgaaaatgagtttttaaaaagtctttttcaaaatcccttaaaaaaacattcttatgagaaaaattattttatcgatgaccatcgtggcctttaatcttttttattcccaagtggggattaatacatccaatccaaaaggtatttttcatgtagacggagcaaaagacaattcgtcaacaggaaatcctacggctgcacaacaggcaaatgattttgtggtaacctcttccggtaatgttgggattggaaccaactcaccaaattcttctgcactattggacgtgaatgcagacggattggcttcaggaagcaaaaaaggttttttgggtccgaaagcagcgctaacttcacagacagaccagatcaccatcccttctccggcaacaggactcttggtttacaatctaggaaccggaggattagtctataacggatatgttttttggaacggaacagaatggagaaccttcaacaacggatctttagcacccggaacagtaggaacaattacctgtaacggaattaccctctctccaagtacatacacaacaggagttccttataccggcacaatgaatgtcccttataccggaggaaacggaggaatttatgctgcacagacaataggttctgtaaacggacttaccgcaactttatccgcaggaaattttaactccggctcaggaacgctgagttataccgtttccggaacacctaccgtaacaagtcccattacaactacattttctttaaatatcggaggcaaaacatgtaatgccgtaattggagcaggagacggactggctcccggagatctcgtattttacaaagccggattttccgcaaatgtctctggctggatgagtgcttttgttacagatttgccgattatcggaggaaaaataagacttgatgcatggtttaacggagcttccaacggaggaaacggaagcgtaacgatgtggccaagactggtaaatacatcttcatctccggtgaaactgtggtttagtgccttaaccaacgtagaccgttttaatgcctcaaattatcttttggctccaagtacacctacaggttcaggagctacccttgctccttctgcgtatatggaactcgataacggaatttactacggagtaggatataatgatatcttaggatctacaacaccaagaacaacaggaagcggggaaggcggacatcaggaagttcttacaatggatctttctttagatgataaatggtacagagtctattatttcccaacagttgataatatgaatacagcaagtacagcagataatatgagagtaatttatctgtcgatccaaagattatactaacacttcagtattttgaagcagtgtgtttttcaagagtggtttgtaatgaaccgctcttttttgctgtttagctttttttattaaaatagaatgaacattcacagaaacaaattttaaaaccactaactttgaaatggatatgctaaatagaatcgtatgaaaaaggacattgagaataaattaataaataaaaataccaaacctacaagcatgaggattttggtatacgattttttgagttctcaggaagccgccctttctctttcagaaattgaaaatcattttgaaaatgcagaccggacaaccatttaccgcactctgaaaacatttgaagaaaaaggaatcgtacacagcattcaggaaaatacgacaacaaaatacaaactctgccacgatggatgcgatgaacatacccacaaagactggcatcttcatttctactgtaaaatctgcaaacagaccacctgtaaagaagatatttcgtttcccgaaaacattcagacccaattcaggatcgacgaaataaggctttttgctaaaggaatctgcgaaaactgtctggaaagtttgcaatagcattgcatgcattttgactgtaattttgaataaaaatttaagttatggaagaatgctgcagcacaaaaccgaaaaaagaacaccaacatcatcatgaaggtcacgaccacgatcattctcatgagacgggagatcagtctgttttcaggatgtttcttcctgcaatcatctcttttggattgttattaataggaatcgctttggataatttcatcaaagctgaatggttttccggctggattcgtctggtttggtacttcatcgcctatattcctgttggtcttccggttttgaaagaagcgttcgaaagcataaaaaacggagatgtattttccgagtttttcttaatgggaatcgccaccgtaggtgcttttgccatcggagaatatccggaaggcgttgcggtcatgcttttttattccgttggagaagtttttcaggcaatggcagtaacaagagcccaaaccaacatcaaatctttactcgatcagcgtcccgatgaggtgaccgttttaaaagacggaaaacctcagattatgaaagccgaaaaagtaaacatcggagatgtcattcagttaaaatccggagagaaattaggtttagacggagaattattatctgaaaccgcctcattcaacacttctgctttaaccggagaaagtaaacccgataccaaaacaaaaggcgaaactgttctggccggaatgatcaacctcaatacagtaagcgaagtaaaagtgacaaccgcttacaaagacagcaaactgagcaaaattttagaactcgttcagaatgctactgctcaaaaagctcctaccgaattattcatcaggaaatttgcgaaaatctacactcctattgtcgtatttcttgcaatcggaatcacatttataccctatttatttgtagaagattatcagttcagaccctggctgtacagagcattggttttccttgtgatctcctgtccgtgtgcgttggtgatttctattcctttgggatatttcggaggaatcggagcaggaagccgaaacggaattttatttaaaggaagcaatttcttagatattctggcaaatgttcagaatgtagtgatggataaaaccggaacgatgacggaaggtgtattcaaagttcaggaagttaattttaatgatgaatgtaatacagatgatattttaaaactcgttaatgctctggaaagtaaaagctcacatcccgtagcaacggctattcatgaatatgtgggagaagtcgatcattcgattctgttggaaaatgtggaagaaatcgcaggttatggtttaaaagcatccatcaacggaaaagaactgttggtcggaaactttaaactgatggataaattcagtatcaaatatgatgttcagcctgaaaatatcgtctatactttaattgctgttgcgtatgacaacaaatttatagggtatttaacaattgcagattctgttaaaactgatgcacaattaaccatcaataaattaaaatctttaggagtaaaaaccacaatgctgagcggagataaatcctccgtcgtgaaacacgttgccgatacattaggcattcagaacgcttacggagatctgcttcccgaagacaaagtgaataaagtaaaggaaataaaagcaaaaaatcaaaccgttgcctttgtaggagacggtgtgaatgatgctcccgttgtcgcgttaagcgatgtcgggattgcgatgggcggattgggaagtgatgcgacaattgaaacagcagatgttgtcattcaggatgatatgcccagtaaaatcccgatggcaatcaacattggaaaacagacaaaaaaaattgtgtggcaaaatatcattctggcattttcgatcaaagcagttattcttattctcggagcaggaggtttggcaaccatgtgggaagcagttttcgccgacgtcggagtcgctttacttgccattttaaatgcggtaagaattcaacggatgaagttttaataagccggaagagggaagtaggatgagaagtttattgtattgcgaatatatcgtcaaaaagctgtttaatcatcaataggaacgggctttagcccgtttgcaaggataaatttttcaattcggctttagccaaaattttttttcctcacaggtttacacagattcttttttagtcatcgtaaagcatttttattcatctgtgaaaatccgtggtttcgcggtagaatattaatccgctttatctgcaaaatcagcgggagaaaatataagctctcgcagattatgcggattacgcagatttttttagtttcatcataaagcatttttaatgctttaaattatttacccggaacttgagaatttgagaaatctctgcgaaaataaagcgtacaattaaaccattgccaaaactgactttcatcataatctgtcttaaaaacaaaatttcattagtatatttgtagagtagaatattgcattgaagtttttcgtttccatatttatcatttttacgattgcattacgtcccgttttgcccttgattaattatgccgttaattatgactacatcgtaaaaaacctttgcgaaaacagaaacattccgcaatccacctgcaaaggaaaatgctacgttgccgaagaattggcaaaaacagaaaaacagtccaatactaatcagacggtaaagatttcaggactcgatgtatttatctcccatgaaatactttccttttcagataacagtcagttgagtgttttaaacaaaaactcagactcgcgttatatcaatttccatacttcagaatatttttccagaatattccatcctcctttagcttaatattattttcagctaattctttaactgaattgatactaaaaaataaagtatagctatcacttgctgagtgttaacgcctttgcgaacccataaacattaggtttacaaaaaacttgcgagcttagcgttaaattagatttattgtagttatctgtaatttgtcgtcataaaaatctttgtgatcttagcgttacaagacattatgattaattaaggataaagcaagaaattcatcagtaagcttagttaaaaaatcaatccattcaaacattattaatttcaatataaataaaaatgaaatcaaaacttatcttaacagcactattgtctgtttcattaatggcatgtgcacaggaaacccctaaagtaaagcataaaaaagcaaaaacaactgcaaattccgggacaaaaacagtgaaatttgccaatgcggtagatcccatctgcaatatgcccaccgaagccgatatgaaagatacggcagtctataaaaataaaacgtacggtttttgcagtgcttactgtaaagacgaattcaaaaagaatcctgagaaatatgccaaaaaataaaaagaccagtaattccaaaagcaaagtaatcgttccgattgtgattattgctttgctttttctgggaataggtgtcggaatggggtatttcaaaaaaaatctgtacaccgtaatgaaagttccggactttacattaacggatcagaacaacaaaaccgttaccaataaagacatgctcggaaaagtctatctggtagaatttttcttcagcaaatgcccgacgatttgtccggtcatgaataccaacatgagagccattgaagaggagattaacaatcccggtttcggaatcatctctataagcattgatccggaaaatgatactccgcagacattaaaggaacacgcacaaagaattggcgtaaaatctccgaactggcattttttaaccggaaacagagattatattggtaaattagcagatcagttcaatatttatgtcggagataaggaagacgaaagcgaaagtcttaatcatagcggaatgattgctcttgtggatcaggaaggaaacatccgttgccgatacaataaagacaatatgccgattttgtattattcgggattaaattatgaagatccggaaggaaaaactccgaaactgaccggaaaataccatcccgacagagaaatattgatagaggatattaaaaaattattgaaataaaggtttggaaaatggaagttagaggctggaagttttatagagtatttaaaagaacttcaggcttccatcatctgtctcccagccaaaataaatcacataaaaataaaatagtatgaagattttgaaagtagctgctctgagtgcagtttttgcagcgcagtttgcgtttgcacagtttaagcagacaccgttgccgtatgcttacaatgcgttggaaggaaatatcgacgcacagacaatggaaattcattattccaaacacgcagcagcgtatgttgcgaacctgaataaagcaatcgcaggaacgccgcaggaaaaacagaccctgttcgagatcatgtccaatgcttcaaaattaccggctgccgtaagaaataacgcaggaggacattacaatcacgagttgttctggaccgtcttaacccctgaaaaaaatacacagccttttgaaaaactggcaaaagcaatcaatgaagcattcggaagcatggatgcttttaaagcgaagatggcaaaagccggagccgaccgcttcggatcaggatgggcatggctttccgtagataagagcggaaaattatttgtttcctcaacacccaatcaggataaccctttaatggatgttgtagaagaaaaaggaacccctattttcgggatcgatgtttgggaacacgcatattacctgaaatatcagaacaaaagagcagattatttaaccgcgatctggaacgtaaccaactggaaagaaatcagcagaagatacgaagaagcgacgaaagcaaaaaaagggaaattcgatgattggcaggctatgaaagattttcacaccgtgatgtctcagactttccatcctgcggaagaaggcaatcttcagcctatcaaaacaagagcagcagaaatggcatcaaaagcaaaagcattgcaaacttcggctgttcctgctgaatttaacaaaaaaggcgttaaggaagccattgcaaaactttctaaggacagtcaggatcttgaaaaacaaatcaagaaaaaagattctgatgcaaatattacaaaatctcttactgctctgcacgatactttccatacaattgtaggattgtgttctgctgaggatgaacattaattgattgatataaaaggcagcttattaatttttgtaagttgcctttttatgtttaatatcatataacaaaacaaaaagtattattaaatttgctccgtgaaatatatcatttctattttcatgattattcagatgacaatacgtccgatattgccatttatagattatacagttaattacgactatataactaaagaactttgtgagaacagaatgaaaccagagttaatgtgtaacggtaaatgttacctttcaaaagaactctcaaaaactcaggagcagggaaacaaaagcagtcagaaaataagtctgaattccatagatatctttatcgtaaatgaaagtttagacgacagcttcatcctcaaatcaaatattctgaaaaatactgtcggtacattcaaagccgattcttatcatcatttacactattttcaggtttttcatcctccattagtgtagcataatctcttctgtttctgaaaatgcagaagaataattttccggacaatctataaaggtttttctgatattgttttacaatgtcaatgttcagcaattgcataaattaaacgtttagctgtaatgccacggctgtaatcgttgggctttggtctccttatatctcagaggatacgcaatgctgaaaacaaaaactgttttttttataaaaccctgtaaaatagtgttcagaaaattcctcaaaaatatcaacaaaacttttttcttcaagagaatcgggatctgctcataacagaatgggtttaagaaatcgtttcgtttccataattgatttttacagatcagttcattagagcattttgccgattctcttatttgtttaatatatatccggagcaaaaatatcccggatcgaaattttataaagatatgtttcaaaaaatattatctgtaatagctttctcttttttcaatcttattttctcccagcaatattcgtggaatactcaggggattaccgttgccggaggaaacggagcgggcggtgcaaataatcagcttaattttccttactctgtttttattgatagcagcagcaatctatacattacagacacccaaaatcatagaattgtaaaatgggattcggcattaaatcagggagttactgttgccggaggaaatggttcgggaggcaattccaatcagcttaatactcctacttgtgtttgggtagacgataataagaatatctatgttctggattcgtttaatgcaagaattcaaaagtgggaacccaatgccgtaacaggaattactgttgccggaggaaatggagaaggagcagcacttaatcaactaaacaagcccggtggattttatctcagaggaaacaccttctatattgttgatgcaggaaacagcagaattgtgaaatgggcaataggagattcttccggaactttggctgctgcgggtacttatggcgcaaatgcagatcagttagccaatccttctgttaacggaaccatctatgtagacaacaatgagaatctttatgtaacagattatattaacaacagggtacagaaattttcttcaggcagtacaaatgcagtaacagttgcgggaggcaatggctccggaaccgctaataatcaaatgaaagcacccaacggtatttttatgatgaacgacggaacaatgattattgctgaatacacaggaagaagaatcctttcctggaaagaaggacagaccagcggaaatgtgattgcaggaggaaacggaaatggaagtggagcagatcagttcaaaagtccaagaggagtttttgtggcaccaaacggagatctttatgttacagacatgggaaaccaccgcatccagaaatttatcttcaacggaacactttctactcaggatgagattaagcataccgtttccagttccatatatcctaatccggcagatgaggtcattcatataactgcgaaatatcagattgaaagcatcaaaatttttgatgtttcagggagagatgttacaggaaacaattccgttaaaaacaactctgtacttacggttcagagtttagaaccgggagtatacttccttcatctttttgggaaaaaagaacatgaaactttaaaatttatcaaaaaataaatactaaacaacaataattttacaattaaatttaatcaaaatgaaaatttacaaattcttatcattactcttcgtagcaattacattacttaccgtttcatcttgcagcaataatgacgatgaagaagttctggacacgactccgggaagtttacagctaaaattcgaaaacggattcaataaccttggagacatcgttttaaaccagactacacaaacttccgttaacggacaaaaacaccagttttcaaccctgaaatatgtaatcagcaacatcactttaatcgatgaaaacggaggagaattcaaataccattacaacgatccggataacggagcctttatcgtagatcaggcagaagtcgttgccggaattaattacatcaacctgaaagaagttcctaaaaacaattataaaaaagtaagaatcggtttaggaattagtcagtcagcttatcttttgggacaaagcggacagggtgttttctggcagaaagcaaaaaccgctggaatggcttggtcttgggcggcaggatacatcttcacaaaactggaaggtaaatacggaacttcttcagccactacagaattcatgaaccactgtggaaatatggggaatactgcagcaaacaacactgcagatctttaccgtgaaattacccttgattttccttcaacggcaagagtatcaaaacagattacaccatcagttcacattttagcggatcttaaccaatatctgagcggacagactgctttaacattggatacttctaacgacatggcaatgggatcaaaccagcatttggtgaatgttaccaataatatttctaaaatgtttaaagtagatcacgttcacaatgattaattttttcatacaatccaaaagagggcaattctgctctctttggatttttctctttattgtggtatttcccctgacttcctgcacggaagatgaggttttggagcctttgccaaaagatgaagcttatcgtctcgacaaacctgcgggttttccggacatcactttcgatattacaggaaatccggtcacggtgaatggagtagcattggggaaaaaacttttttacgaaggaaaattatccagaaataataccatttcatgcggattctgccatattcaggaatatgcttttacccatcacggtcacaccgtaagtcatggaattgatgaccgattaggtatccgaaatgcaccaccaatacagaatatggcatttctgaaaaattacacatgggacggagtcagccacaatctggacgaaagatctctggttccgatcaccacagattttgagatggacagctcgcttcctgaagcggtaggaaaattaaatgctgatgcaaattacaagaaaatgtttaaagcagcgttcggtgacgaaaacattaccggtgaaaaaattctcaaagcaatttcgcagtttatggcaaccatgatttccgcggattcaaagtacgacaggatgaaaaaaggaacagaagtattttcagcagaagaaaatcagggaatggctctgtttcagaataaatgcgcatcttgtcattcgggagacttatttaccgatgaaagctatcggaatactggaatgtattataatccgcagtttgacgacagaggaagatatcgtgtaacgctggactggaatgacaatatgaaatttcgtgttccaagcctcagaaatgtagaatatacagcaccttatatgcacgacggaaggctttacagtttggaagcggttatgaatttttattctgataatgtagaaaaccagcccaacctcgatccgttgctgaagcaaaacggacacgttggaattcctatgaccgcttctgaaaaacagaacaccatcgcatttctgaaaacgttaagcgataaaacttttataacgaatccaaaatttgcagaataataaaatcatgaagaagatatttttaacattgggtttagccggatgttttttcagtcaggcaaaagaaatccgcgacagtttatttattcccaaagaactcaatccactgttctttgatgattgtgatgcatgtggctgcgccgcaggaaacggttcttccggatttgaatctttactgaatcctcagtttatcggcgttaaatattttgcacagcattacagagccaaagaaaatttattcgtcaatgatcttacgcaggatcagtatttcaatacgctccagctttggggaaaaattccggttgccaaaaatgtaagtgtgtatgcaagtattccgtttcagtttcacaccaaaaaaacgttgcagggagatatcaaaattgaaggaatcggagatgcgaatgtaatgggaatctatcagatcatcgattccaaagattcttcccatcaactgaacggaggtttcggtgtgaaaattccgatcggaagattcgatgaaaaaggaatcaccggagtaaatcccagttttcagcttggaacaggaagctgggattatcagatggttttaaactataaatttcagaaagataaactggcggtattgctgaacactgattatactttaaaaacagaaaataaaaaacattaccgtttcggaaaccagtggaattatgcagcaacgggattttacagactctggaaaaatgaaaacagcattctttcaggaaaatttggaatgcagggggaagtctacgactggaacagacagttcggagaagtaatgcctaaaaccgccggaagcgctttgtacggaaaattaggttttgaagcctcttacaaaaaattcagtttgggaagcgaagtaatgcttcctgcttacacaaatcttgccggaggagatattgaagccaaatcccggtttagcgttttcgtaaatttcggaatttagatttaagatattcattcttcttaaaaaccttcattgtataatggaggtttttgttttttcagattttagaataccgtaatgaaggatgagatgaattaaatagtatgaataaacaaaaaagagatccaataatgaatctcttttgtagcccgtaggggaatcgaacccctcttaccagaatgaaaatctgaggtcctaaccgatagacgaacgggccatctaatttctgcgaataatcgcagggttagtttttgtttttataagtttcaactcttattaattaccaggttagagtagtaattaagttttgtagcccgtaggggaatcgaacccctcttaccagaatgaaaatctgaggtcctaaccgatagacgaacgggccaactatacttattaagctagtttattaacgtgcttagttaatttgctttttaagttagctgctttgtttttgtggataatatttttcttagctaatttatccaacaaagagataacttttggcaattgctctgcagcagcagccttatcttcttcatttcttaacactttcattgctgttctagcagtcttgtggtagtatctgttacgaagttttcttacttcgttttgtctgattctttttaatgctgatttatgatttgccatatcgttcaaatgtgagtgcaaaagtaaaaactttttttttatcctccaaatttattttcaaaaatttttaattttcttcagataaatattttttgagtttatctattgcttgttctattttaatattctcttcttctctttctaattttttgatggtgcttttcagcattaccatcgcattgttccattctccagtggtattggtgaaggtaagtccgtcaatcgttacttcaaaagttaccctttctccagtcctgtcaagtctgaaacttattttatcatcactgcctgttatcccgtcttcattgatttttaaatcataactttttgggttagagtggattttcttaaaaagcaattttgcttcttgtatttttaaatccggcatgatataaatttggtagcctataggagaatcgaactcctgttgcaaggatgaaaaccttgagtcctaaccactagacgaataggccaaattttgaggttgcaaaagtaataattaactttttaacttcaaaattatttttttattatttgaaaactttttgaatcacagtattcttaattcctttagcatcaagctctttctgtaatttcactgcatcctccaaagtatacacttttccgtaggtataatagaaaacgccgttttccttgtttctttccacgtctttcagcgtctgaagaatgaaagaatttccattcagtttttcgcccacgtagacttcaatggtgtagtatcccgtatttaatttctggttcggcataaatcctacggcataggcattccggaatcctgcatcttttgctgttttaatgttgatatctcttacagaagcaaggttggtaaccccgtaataatatttgtactgtccgttctctttaataggcagaatgtaatttaacccttttaaagcaggatctccctccttgaatctttccggagaactcaacagtaagattctgaaatcatttttcagtgcgatttccgccagtttatccggttcaggtttttttaccactgcagaaacacccgattttctgtcgatcgcttttttataatcaatgattgcctgataaatactttccgaaatctcatcctgtcctttttcagaagccagataatggctttcttctggatgattgatgaatccggtttcaattaatacagaaggcatcgcattcatacgtaatacgtgtaggtttttctggaacacaccgcgggaacttcttttgtccttattcacaaaattattttctaccagtccgcccagaagaaggctggattccagatatttgctctgctgaagtttcagggcaattaaagattccggagaatttgcatcataagaaccgaaggtctgcttatctttttcatccagaaagatcacatcattttcacgttttgccacttcgagattggtatcattctgatccggtccctgtacataagtttcggttccgtacgcggttggtcttttagaagaattacagtggatggaaacaaaaagatccgctttgcttctgttcgcaagattggttctgtccgacaaagaaggatattcgtcgatctttcttgtgtagattaccttaaaatctttatttttttcgagcattgcccctactttaagcgtaatggagagcgttacatccttttcggagatccttccgatatctgtataggttctgtttgctccgtaatcacttcctccgtgtcctgcgtccaaaacaatggtaaatttcttttgcgaaaaaataaagttggcagtcaggatgaagagaaatgataaaattattttaaaatttactttgtacatcttacagttttaaaatttatattaattttgagccttaattgtatacatataaatataacaaaaaattggtcaaaaccgtctccaaaaatatattacaaattttaattatcctaatttttaacaattttttagcacagcaaacgcccaaaaaattgcctgaaaatgcggttaatgatactatttccaaaaaagataccattgttctgaaaaaggaacctttggaatctgttctgcagacaaaagcagactaccagagaagagatttccagaagaaaatggtgtatctgaacaaaaatgcgcaggtgaaatatcaggatatgcagattgatgcagactatatttccattgatgagcagaaacatctcatgtacgcacgaggaaaacaggactctttaggaagaattatcgagcctgttattacaacacaggcagggaagaaatacgaaactacagaatttcagtataataccttaacaagacaggctattgcatttaatgcaagaaccgaagaaaacgaaggggtaattacggcaaacaaaaccaaaaagtacaacgacagtatctttgcgatgagccgtgcagattatacgacggacgattattacatcaagaaaaaagatacagcagcagattattttttaagagcaagatatctgaagcttgtaaaaacaaaaaataaatcttctattgtttcgggaccgatccagatgtatatagagcaggttcccactccgcttatcatgccttttgcgatccttcctttttcaagcaaaagatctgcgggaatcctgattccgagtttcggggaaagacaggatgtaggattcttcctgaacggtttaggttattatcagccgatcggggagcattttgaccttaaaatcctttcggatatttacaccaaaggaagctggaacctgcggcctgaaatgaattatattaaaaaataccgctattccggaaacttttctgcggacatcggaactatggttcgcggaatcaaaggtttagatgattacagcaaaacaggaacgtacagaattgcgtggagacatacacaggattccaaagccaatcctttccttacattttctgcatcggtagatattgtgagtacaaaattttataacaatacactgaacaacaattatattttaaatcagaatgttttaaatacccagcaaaactctacggttacccttaccaaaagatttttaaaacttccggttaccattaccggaacggcttcctattcgcagaattttgccaccggtttatcagatcttcgtctgccgcagatgaacgtggcgatcaatcagttttatttattcagatccaaaacaggagtgcgttccggtctgcttgaaaatttaacggtaaacacaggaattaatttatcaaactttgttcagaccaacgaaggcgagctttttaaagcggcaatgtgggataaactgcaaaccggagtgaaaaataacattgctctgggaaccaatacaaccgtagcgaaatatttcacattcagtttgggagcgaatattgataatgcgttaaccacaaaaaccatcaataaattctacgatcctatccagaataaagtagttacagaaaccaataaaggaatttcaggatattctacgttttcaacaacagcaagtattcagactacgttatacggacaggcaaactttaagaaaggttctgcgattgaagccatcagacacatgatgacgccaagtatcgggtttacctattctccggatttcggaggttccggatatggatattttaaaaattattacgatgcaaatggagctttaacaccatattctatttttgaaggcggaattatcggaagtccgacgacaggattagtaggagctttaggttttaacatcgggaataatttagagatgaaggtaagatcgaaaagcgattctacaggagtgaagaagatcaagatttttgaatctcttaacctttccggaaattataattttgcggcgaaagatcatcctttttctatcattacaattacgggacagtcttctttctttaataataaactcagcctgaatacaagtttatctttagatccatacagaattatctatcttccggggcaggatgccggaataagaacagaagagtttggttacttcagtgttcagggattcaacgttcagatgtcttatcctctgagcagcgaaatctttggagaaaaaacagattatgccaaaaagtataaaaccaaaggggaagtaaggaacgaaaattattattttgatgatgataattatgcgcatttcgatcaggcatggacattgaatgtaaatgcaaactatgcctataccaaaagttcagcttccagaacgccaacgagactggcttctgtgggactggacggaagtcttaagctaacgccttactggaacatcaacggaagtacccattacgatatggtgacgcagaaactggcatataccagaatcggttttgcaagagatcagcgaagttttaccattaatttcaactgggttcctttcgggcaatataaagtatatgacttctttatcgggatcaaagccaatatcttaagtgatgcactgaagtataaagacagaagttttacacagccaaatgtacctttctaatatttgattatagaaatagaatataaattttatatttgcacccaaaataaattttcatgaaaaaagtaatcaacaccgtaaatgctcctgcagcgatcggaccatattcacaagccaatatggcaaacggaatattgtatatctccggacagatccctgtagatcctgcaaccggtaaactggtagaaggaattgaaaaagaaacacatcaggtaatgaaaaaccttgaagcaattcttacagaagcaggaatgacttttaagaatgtggtaaaagcaaccattttccttaaaagcatggatgattttgcggtaatgaatgatatttacgcttcctatctggacgcggaaagctttcctgcgcgtgaaacggtacaggtttcctgtctgccgaaaaatgtggatatcgaaatttctatgatcgcacatcaggattaatgaattttataagaaatacaattgcggttatcgtaggtcttgggattgcaggactcattattactcttgggataagagcatttccgcaatgggtaaatttcgatgcttttgctccgttcgagcattggcagagatttcttcagagcaagcagaacgacggtgcgtttttcggtttcctgctgtttatttccggactgggaactacagtgggaggggtggcaactgccattatcgtaaaatatgctaaggtggcttatgctattcttatcggtttcattatgctttttatagccatgctggatgttattgttttcccttatcatcctaccttctataaaatctctatttttcttacgttcttcccgttttcgtggatcggaggtaagattgtagaagtcatttatgaacgaaagaagaaaagaagaatcgctgaaaaaatgaataaatcataattataaaaacgttgcagaaatgcagcgttttttgtttgtgtatcagtttccggaaagtgtcttactagggtgtgggaaggtttcccgctttccggaaagtttgctgcaggggtgaaacatcctttcccggttccctgaaaagctgttgcaggggtgcaggaagctttccggaaggatggtttgcagatttcagttgcaggatttctttttcaattaaataagatgtttctgaatattaaactaaaaaaactcggctgcctcatttgaggcagccgggtttttgatatgaagtgaagtttagctcttttattaaggcattttaaagcctctctgatatcctcttccgtagtcatccatgtatttaatctgggcagttccggtgaacttattcagaatgttttctacgtctttctgtgagtttacgggttttccgttgatctctgtgatgatgtatccgtctacgattcctgctttagccatttcaccgccttcaattacatttttggcgattactccgctgttcagaccataatacgcttttgttttgtcatcaatactctggaaatcggctccgattttttccgttacgctcagatccgcttttgttcttgtagaagttcctcctttctgatctcttaacgtaactgttgtagtggaaggttttccgtttctctggtaagttaccgtcactttatctcccggacgtttgcttccgatggcaatggaaagatctgcaaaatctgtaattggcgttgtatcaatctgggtaatgatatcacctacttttaaccctgcatcttctgcaccgctgctttctccgaatcctgttaccagaactcctgagccggatttataattggtctttttatctttattgtaagcggcaacaagctgatcgtcggaaagatctaaagaagttactcctaagaatcctctctgtacgataccgaattttttgatgtcttcaacaatctttctcgctaagtttgccggaacagcaaatccgtatccttggtaataacctgttgtagactgaatcgctgagttaatcccgatcagatctccgtttgtatttaccaaagctcctccggagttccccggattaattgctgcatcggtctgaatgaaactttcaatcggattagccgcttttccctgtgaacttaaaattccaattcctctgccttttgcagaaacaattcccgctgtaacggtagaattcaatccaagcggatttcctacggcaagtacccattgtcctacttcgatattatcggaatttgcaaaatttaaataaggcaatcctttttcttcaattttaagaagagaaatatctgtattcgggtctgttcctactaaagtggcgatataagatttcttgttgcttaaaaccacttctaacttattggctcctgcaacaacgtgattgttcgaaatgatgtatccgtccggcgaaataattacccccgatcccattcctgaaggcatattatccggaacctgctgcttttgtctctgctgtcctcttcctccgaaaggatctccaaagaagaaatcgaacatatcctgctcagaagctctacttgtggttctggactgataatttttgatggttaccactgccggaactgtcgttttggcagcttttacaaaatcgtcccccactgcagcggaattcatccctgcgaaggaaacattagaagattttgtaaaatatgattgatctgcgctgttggaatcgtgattaagatactgtaatcctccaacggtagtagcaccggaaattactcctactactgcaaatggtaatagtttttttaaagtactcttcattgtatatctctctttgttatttattgatgttaactttttcattttactagaaacaaatttaatgctaaataggtatgcaattggtacgtaatgtttcatttttaactaaaatttaacagcaattgcaataatttatgcattatcccataaattttaaaatctcaattaacgaaccttaaaaaaatcttaatgacattatggcatattgatgttttgaatgtcataaaattacaaaggttgaagatgattcatccaaaagagtaccaatctgaatatatacctgacaaatcttatatttttcattaatctgaaaataattatctttgcaaaaattttctcacttaaaacgtttatagcatgcaactgtacaacaccttaagcgcagaagaaagagctcgactaattgatgaggccggaaaagagcgccttaccctatctttctatgcgtatgccaaaattgaagatcccaaaaaatttcgcgacgatttatttatagcctggaatgcactcgatgcacttggtcgtatctatgtagcgcatgaaggaattaatgctcagatgagcgttcctgccgacaactttgaggcatttcgcgagacacttgaagcatacgatttcatgaaaggcattcgtctgaatgtagcagtggagcaggacaatcattcatttttaaaattaaccatcaaagtcagaaacaaaatcgtagccgatggtctgaacgatgagacttttgatgttaccaataaaggcgttcatttaagagcaaaagaatttaacagtttgcttgaagatccgaacaccattgtcgtagatttcagaaatcactacgaaagtgaagtcggtcattttgaaggagcaattactcccgatgtggaaaacttcagagaaagtctgccgattatcaacgagcagctacaggatttcaaagaagataaaaaccttttgatgtactgtaccggaggaatccgctgcgaaaaggcaagtgcttatttcaaacatcagggtttcaaaaatgtatttcaattggaaggcggaattatagaatacacccgtcagataaaagaagaaggcatagaaagtaagtttatcggtaaaaactttgtattcgaccacagattaggggaaagaattaccgacgatattattgcgcagtgccaccagtgcggaaaaccgtgtgacaatcatacgaactgtgcgaacgatgcctgtcatttattgtttatccagtgtgatgaatgtaaagcggcgatggaaaactgctgttcgacagaatgtcaggaaaccattcatttgccttgggaagagcaggttgctaaaagaaaggggcttcaggtaggaaataaagtattcagaaaaggaaaatctgaagctttgaaattcaaaaaatccggagctctgacggataaacctttagcaaaagctgaaacaaaagatatccgccagaaaataaaagttaaaaagacattaatcggaaaagcggagcattattattcaaaatctaagattgctcagtttttaattgaaaacaatgaacttgcagtaggagataaagtattaatttccggtcctacaacgggagatcaggaaataaccgtttctcagatctttgtgaacggagctttcagccaagcagcaaaagcaggagatcagattactttcgaactgcctttcagagttcgtctgtctgataaattgtacaaaatccttgattctgaaaacgcataaacactatgttaaaagcagaattaagaaaaaaatatatgcaaaaaagaaaagccttgtcgattgatgaggctttcttgttatctgaaaagatttttaaaaatttcattgaatatttcaaaccttctcaaaaccagaaaatccatatttttattccgattgagaagtttagggaagtaaatacccagattttcgtcagctactttttaagcagaaagatccgtgtttttgtccctaaaattgtcgatacaagactgatttcggtagaaatttttgcagattctaaatttgagttgaataactggggaatttccgaacctgtttctgatgaagattatggtattctggattatgattttgtaattacaccccttttatactgtgacagacaaggaaatagagtaggttacggcaaaggtttctacgatggtttttttgaaaaagtatcggtagagacaaaaaaaatcggagttaattattttaaccccgaagaaaatatcgatgatgtctgggaaaatgatattccgctcgactatttggtgacacctgatgcggtactgtcttttgcaggagcatcagagtaaaatttcacaaagtaaaatttaaattccttgcttttctgagacggttttgataccaaagtgtattgtgcattccgctcaaaatttcccaaagatttatttttatccccaaaatattccacattgaatttggcaaaattcagcgtgtctttttccttaattttctggaaaacattcagattgctgacgcgtactttttttacattcaggctttcgagttctttaaaaagatccttaaaggtagtagaatcagacttctggaaatacttttctattttagagtaaattgctgtatcaatttccgtatttctctgtccggaaagatataacgtagacaaatccagcacatcctgtactttttgtgaagtaatggaattgatagcctgtgtactgtccatttttaccgttttgttgttcgtgtttcttagcttttccagatcactctgtcctccgttgtcttcttttttaatgcacgaagtcatggtgaatcctattaatatgataaaaaacaaaaagttatttattgttttcattggctgagattttaaatttaatagatacgattttccctttgttatccgtcttcatctcgataacattaaggtttttaagtgatgttgtaggtgtagtgactaaagtgatgtaatcttccttatccaaagtttcaagtccgtaaatatcactgtcgtaaacctgagtgatcacggcgttgttgctgattcggttttccagttgtcttcttttctgggtgatgaggtcattctgttcctgcgaattttctccctttacatcttttgttgaaaaataataaagcgccatcttataatcatcgggtttcagctcgatggtttcctcttcaggggcattttctaagtttcggttcacttccagatattcataaaacggagaactgatctgcattttaagatttttatcttttgtggcatatctgaaacattctccgggttttatcctgtaaagaatgggagattcgttttccttgatcactttgatttctatttcacgctgaatacttaaatttctgtcggcatccgtaaaacagtacacataagttttttgaaagatcgcatctttaaatcctaaaagtcctgtaagaattaccaaaatagtggtaacaattgcccaaacattctttttgaagaaatttttcttgggtttttcagcttctgctaaggaaattttttcagtctctgaatttttattaattaattgattttcaagtattgatttttgtaaatcggagttttcaggggttttaaattcctgttttttaggtaaatcgtcatcttttggcaaatcgagtgatgcagaaactgttttttccagttctttaagttcattgtctttcaaatcttcatcatcctgcagcaattcacctgcaaaaagatgctgttttttgaattcataccatgagtcgtaacctgcataaatactgagtaaattcagcatatcgattcttggtaatttggtaaccggcgaattcttaaaataggtataaaaagatttttcgctgatgttcccttttgccttttttctgagatcttcctgaaaatatatgatgtcgatacccttccatttcgaaatatcgtcataggaaggagtgtattctttcagatattgagcctggacatccttttttagctgctcaaaatgtaatagatctaagtccgtcaatttattttaaaatgattaaattattgattatcagtaatgttattttgtaaaactattttacaaaggtattacaattatttttcctaaacaaattttctatctgctatacctttgtcttgttcaaataacagaacagaaaaagattttataaaacaatattaacaaaattaaatttaatttattatgaaaaagtcattattcgtagctgctatcgctgcaatctctctagttgcttgtaaaaaaactgaagctaacactactgaagcttctacagattcagtaactgctgctacagattctgctactgctgctatcgattctacaacaactgctaaagttgattcagttaaagctgctggtgctgctactactgattcagttaaagctgatgcaaaagttgctaaagaagaaatcaaagctgaagctaagaaagaagaagctgctaagaaataatctaagcttaaaaataaaataaccgtttcactcagtggaacggtttttttatgcttatattttaatgcttgttggtttgttagcgatcaacgatgaaccatcaaccgatcccaacaaccaaattatcccttcttctgcttcagtgtttcgtaacacgttatggcaacagcattgctcaggtttaaagaatcaatgcttcctgccatcggaattaaggtattttttcctttaccgatccagaaattacttaatcctgaatgttctgtcccgaataaaacggcagatttctgcttaaaatctcttttgtaaagatcttcggcagtttcatccataatcgttgtataaatattgaaattatttttctgaagaaattcaaacgtttcctgattttctgcctgaaaaacttccattccgaataagcaacccacacttgagcggattacattcgggttataaaaatcggttttgccgtctgaaacaattaacgcattaattccgaaagcttcacaactgcgcaaaatagcccccagatttcccggtttttcaacaccttctacaataatgatcgtagaatcttcctttggtttaaacgcagatagatcggcttcttttgttttgtaaatcccgataactccttccgaagttccgcgataggcgattttttcgtacactttttcgctgactagatgaattttccctttgggaagttctttctgaaaaatagtttcgcagataaaaaattccacgggttcaaaatgatatttctgagcgcggtcgttttcctgctgtccttccaccacaaaaacatccgattttttacggaatctgttatcggtaagaagtttggtaatgtattttactttttcgttctgaaagctttctattaacatcctgcaaaattagttaaaatttacagttaaataaaaaacctcagagcctatctgaggttgtagattttattcttctaaattttccagtgcggtctgggagttttctaccagactctgcggaaggtctttcttattttttatccccaaagatttcagcttttgggtttggatcaccaaattgtcatttcctgttgaaagctgtttataagcatcattataaacattttttgcctgatccagatttttccctactttttccagattttcgatgaaacctacgaatttatcatacagttttgcccctctttccgcaatttccatagaatttctgttctggtattcgcgtttccagagatcggcaatcagttttaaagaagtaatcaggttgcttggattcagcagcagaattcttctttcgtaggcaaaattccaaagattctggtctgcctgcatcgctgcaatataagccggttcgctcggaataaacatcatcacgaaatcaagggattttccgtaatcatcatacgctttctggctgagctgggtaatgtgatttttaatagaagataaatgctgattgagtttcattaaataaacatcctgatcggtttcgtctaccagttctgtaaaagcggtcagcgaaactttagaatcaatgattacatttctttcatcgggatattttataacggcatcggggcgcatttttttgccggaaaattctgagaacaatgctttattgtcttcatcgcgaagctcatgttcaaggaaatattctctaccttttacaagtccggatttttcaagaatgctttcgaggatcatttctccccagtttccctgcgttttgctttcgcctttcagagctcttgtcagttttttcgcatcttcagaaatctgctgattcagttctgctaattcctttactttttcggcaagagaaaaacgctctttgttttccttttcgtaggcttcattcacgcggtttttcaattccacgattctttcctgaaatggttcaaggatagttttaaggttgttttgatttaaggtggtgaatttttccgtcttttcttcaaggattttattggctaaattttcgaactgcaatttagattcttcctgaatttttgcgatctcttctttctgcgtctgcaaagatttctgtaagctttcgttaattgcggaaagctcggagttttttgcaaacaaagtctgtttttctgttaaaagattttcgatctgaagattctgtttcgcattaaattctttctgttcggaaaactgagtgtttaaagaagcgtgttccgcagaaattttggcaaattcatttttcaggtcattaagaaggtcgctctgctgtgcattgatttctttttccctgctgatattctgtgttaattcctgaattttctgattggaattttctaaatcggaactgtttttaatatgtaaattattgagttcatcgtaagaatttctcgaaacggtagacgatttctgggcgaagtataaaataaccgcaccaagaattcctccggctataaatcctataattaaatatgtcatctccatttttcaaaattacaaaaaggaaaattgatttcttttatggaaaaccgtaagttttattttaggaattattttttagcagcaaaaggtttaaaagatcgttataatattgattgtacgtttattaacctaaagcttcgacaggctcagcttgacatcgctagaaattaagcgtttagtattagaggtttcacactgagcttgtcgaagtgcctgttataaataattgattttcatttcagtgcatagtaatatgttgtttaacggatattcaattataatatgttgattacgatattcaaagctatcggtgtaataaaaattaaaaatgttttgtgatattgttgttaaaaattaatcatctaaaaatattagtttttcggaaaagatatttgcaggatcaatttgttttccgttatttcatcttttcaaatcaaaaataagtttcatgaaattcttaagcattgcggccgttatgttttcagccttgttttccgcacaggattttgccaattatgctaaatatgaaaagcaaaatcaggaagttttagccaagaagatcattcccaatactgtttttattggggattctattacggaaggctggttttccacagatccatcattttttacaaagaataattttgtcggaagaggaatcagcggacaggtaacttcgcagatgcttttaaggtttcgtgaagatgtcattaatttaaaaccgaaaagagtcattattcttgccggaacgaatgatattgccgaaaatcaggggctgatttctctggataaagtttttggaaatattgtttcgatggtggaactggcaaaagcaaataatataaaagtggtgctttgttcggtgcttcctgcatacgatttcggctggagaaaagatatgcatcctgcggaaaaagtaattgccctgaatacaatgattgaagcgtatgcgaaaaagaacaatattccgtacgtagattatcattccgaaatgaaagattcccgaaacggactggataaaatctataccgaagacgaaatccatcctacggcaaaaggctacgaaaagatggaagccattttgatgaaaaaactgggcaaaaactaagaatcttatttgggtcggattaaattaattgtaaggttacataagaaacttaaacatttttggtggaagccaaaatttctatgttttttaccacgtcattgctttcacattttttcaattcctttaataaagaaggagtgaggattttaggattcaaaatttgggtggcaacttttgctgcggcataatcaacaattccgatcacgttctcgcgtaggaaatttggcgtatttgacgcgataacggcagttgcccatgaagtatctcttgcttttgaaatggcaaagtccaaaataacgttgtcttttccgttcgaaagcttatcaattaattctactggataacaaatcttgtttaaagaatcctgaactttctggttaatggaagcaatcacattgttgatgttttcaaaatcttttttcagcggattgatttttcggtagggcataatggaagcagcggaaattcccagatcgagattgatgtgtgcattcatgcctaagaaaatgtgctgtaagatgagcagatttttgttttttgcggcttcaaaagctaaaaaccatgagttggtgcatctttttcctttcgaataggcttcccatgcttcgagataacgtgtggcaaaagcaatatccagtacaatcattctcggattatcttcaaattttttctgctgaattcctttcagaacctgtgctgtcataattctgtaggtgcaggcaaaatatccgaccggactttgattttctttcgcccagatgatgattgcgtctaattttttcaggacttcttctatggttttcatgatgttttgttttttataaagataagaaaaccagtcaaaagtttttaattaaaatattttgtatatttaaatctctataaaaggaattattaaagaggtgtccgaaaatcttaagagtaggagcaaaataaacaaaatactatgaaaaatttaaaatctttaaaccgaaaagagctgaaaacaatttcaggagggctttatgaaaactgccaagttcctttagaatacggagtctgtaatccgggatataccttctgcagtaatccttattgttgtgtacttgcgcgtaaaccttatatttgcattgattattagaaaaagctggctgtcataattttgacagccagttttttatttttcgtaatacgttatctgaattttattatcatgaactttcataattccttttttagggtgttggaaatataattcaagatcattctctgcttttttaacaataatgggttctgaataaaaaatcttttcaggaagttcagttactgtttcaaaccggttattttttaattccgaaatggttgtttttgttccgtcaatacctgaaattattgaatacagttttttgttataaacgaaacttgatacgatgagaactcttgttgtatcaagaattttttttgttcctaaagttgattctgattcatattcgcgagttataatatcaggatgataaaccggaattttttgtgttgttgccattttttcaggatctgcaatttcaagaatctctgaaaatcctatcatatgcgccaaagaattcgaaacgtaatattttccgtttattttatttacagaaacagggcaggttgccactgcataatgaatgacattgttttgtctgtttttaaaataaacagttcctccccattcaccagagcagcttttccacacttcgtatttttcatccttataaagtaatccggaaaagttggtttcctcttcttttaaatgcttaagttcatcaataatattttttgaaacatgatttatttttacttcgaatacggaagatttattcttgcagttgattaatgatagtaacaataaaacataagatagttttctcattgacctgagtaattaaggattttctttcgcaatttcctcatggtgcttcaggtacaatggcaaagctgccgatccgtaccatggcaagatttcatatccgaagactcctgcttttacagcgggatctgtttttacccatgattctgcttcttctttggattttgtattgaagatgaacattccttcaaaattttgtttgttatctgaggtgaacggacctgccactacaagttttccttctttagcaagttttccgatattggctaaatgttctttcattaactcagccatttttgtcttgtcttcaatttttgtagttcctgttgtcagcattacgattacgtacggcttcattccgtatttatcggctcccagttctgtagccaatttttcgttgaacttcggtttttctatcgtcttctgagcaaatgaaaatgctgttgcaaaaatagaagctgataagataatttttttcatcatttctgttttactcttttattcttaaaaattctttcgccagttcaatcattttaggatctccggtatattttccgtgttcatcggataattttacagttggaatccattctttgttcggagcctgaacgccgataagtttcatgacaatattcataggttttaagccgacatcattggtaagattggttccaattccgaaagaaactccgatctttcctttgcagtatttggtgatttcttctactttctcaagatttaaaccatctgaaaaaataatatatttgaataacggattaatgccatgtctttcataatgagcaatggttttatcggcaaattccagaggatcgccgctgtcgtgacgaacaccgtcgaaaagtttcgcaaactttttatcaaactgctggaagaaaacatctgttgtgtaggtatctgaaagggcaactcccaaatctccgcggtaaacatccacccaatgttccagagccagttcgtttgccattttgaaaccatattccgcagcatggaacataaaccattcgtgagcgtgggttccgataggttttacaccatacttcatcgcgaaatgcacattagaagaaccgatgaatgtagagtctttcttttgtgttaaagcttccataaccagattctgaactttatgggaatgtcttctgcgggttccgaattccgcgaaattaacgcccagttttgccagtgtttcagctttttccagtgttttgttcatcaccacttcattggaatctctttccatgtggttcatttcgtagtgaagctcgctgataagcgccaacaaagggacttcccaaagtatcgttctgtaccataatccttcaacggttacggaaagatcgtttccttcctgatgaattttaacttcggaaggatcataatgataaccttcaaggaaatcaagatagggtagatcaatataagggcaggttcttgccatgaactttttttcgtctttcgtcagcttcagttctgccatcttatcaacggcttctcttaaggcaatatcgaaaccttcaggaaactgatgttttccacggttaatgaattcatattttacctcagaacttgggaataattttactaccgcattctgcatggttattttataaaagtcgttatctaggatagagtttaatcgtacgttgtacataattgtgtaatttatacgcaaatatagttattaaaaataaaatcacctaaatgtaaggtgatttttttaaattttccggatattttttctttctttactttccaagataagagttgtacatccatacttctttttcctgttctgtaatataatcgctcatttgcgagttggttccttcgtctcctgctttttccgtcatatccaaaagttctctctgaagatcgataactactttaaatgaatttaaaatgttttcaacactttttgtagcatcgcttacttccacgctttcttttatggttgatactttcaggtaatctgaataattatgagcaggtgtagcacctaacgttaaaattctttctgcaatttcatcaatctttagaacaagactattataaagctcttcaaattttgggtgaagggtaaaaaactgatctcctttaatattccagtgagagcctcttgtattctgataaaatacagaatagttagctaaaagaatatttaatttttctgaaatctttttgcagtcggtttctttaagaccgataatgttggcgtttttcatatctctattgtagtttatttttctgtaacaatattaagtaaatattgtgccgaaaatgcggtttcgtgattgatgatacttatctttgatattattagaatgaatttaaacatggaagcttcgtcaaaagttaatttgaaaagttttatagtctctcttcttttttttgctgctgtatgtgcagtttattttttgatatccttatcgaagactgacggacattatatatatatgatagatgatgcgtatattcatttggcaatggctaaaaattttgcgctgtatgatgtttggggagtaacgaaatatcagttttcgtccacttcatcatcaccgttattcacctatattattagtattctagtaaaagtatttggaaatgatagtcttatttcactttggctaaatgtattttttggagtcggaacggtttattttctgaataaatatttttcgggtgttttcaatacggcaaaaaatatcgtgctttcagtgctttttacccttttcttttctgtaatgcatttgcaggttttatccggaatggagcatgttttccatgtttttttatttgtggtaaatattttctgtctttcgaattttaaaaacagatattctgtttttggattttacctcactttattattgatggggttggtacgttttgaaagtatgttttattttgtaattcttgcttttctgttttttttaattaaaaaatggaagcatgtattcttgattttgctggtaggttttatcccgattgtactgttttgttattttaattttcagcatgatggttatttatttccgaattcagtaattgtaaaaggaacgaggtttacttttgattcccattttccgaatcagttgaaaactatttttcttgataattttttgttaaatgtgagcttttataaaattgggctctttccgattatgatttgtctgattttaatgataagagattttagaacaaagaactttcaacaaatagttaaagatcattttttactgattgttatttctttactgatggtttgtcactctatgtttgctgatctgaaaggaatgttcaggtatgaagcttatattcttacaggtttttccatggctctgattccaaaacttaagggcttatttgaaaatttcaggacttacattaaaaatgaattaattatttcaggatttatcttggcaaatattcttttgttgggatataaattttccttcgctcacaaaatgctgattgatggaggtaaaaatatttatgaacagcaaattcagtctgctaaatttctgcacacctactataataaatcaaaagttgttgccaatgatattggagctgttacttattacacagatattcatttgcttgatatagcgggtttaggttcaaaggaaacaattgtctttaatgaaaataaaaggcatgcagattctcagtttcaaagttttctaacaaaatataccgctgtaaataattatgatattgccatcatttacgaagcatggcttcaaactcacatccccaaaaactggacaaaggtagccgaactcaagatcagtaatcctattacggtagcaaaagataaggtgtccgtttattctgttaatggtaataatctggaagaacttaaaaataatatcaaagattttcactggaacagaaatgttcgtgttacaattgttgataaaccgtaagtatctgttaattaaattttaaataaaaatattatttctatataactgcttgttaattaaaaaaatattactatttttgcaccctaaaataaaaagcaattaaatgcctactattcaacaattagtaagaaaaggaagagccacgcttgccaagaagagcaaatcggctgccctagattcttgtccacaaagacgtggtgtatgtacgagagtatatactactacacctaagaaacctaactctgcactaagaaaagttgcaagggtaagactttctaacggtaaagaagtgaatgcctatatcccgggcgaaggacacaatcttcaggagcactcgatagtattggttagaggcggaagggtgaaagacctaccgggagtacgttaccacatcgtaagaggtgcattagacactgcaggtgtaaatggaagaacgcagagaagatcgaagtacggagctaagagacctaaaccaggtcaggcaccagctgcaccagcaaaaggaaagaaaaaataatcattaaataaggtacagaaacaatgagaaagacgaaagcgaaaaaaagaccgttgttaccagatccaaaatttaatgatcagttggtaacgagattcgtaaacaatttaatgcttgacggtaagaagtcaatcgcatttaaaattttctatgatgcgttggatatcgtagaaactaaaaaaggagattctgaaaaaacagcccttgaaatctggaaagatgcattaacaaatgttatgcctcacgtagaagtacgttctagaagagtaggtggagctaacttccagatcccaatgccaatcagagcagatagaaaaatttctatggcaatgaaatggttaattagctactctaaaaagagaaatgataagtctatggctttgaaattagctaatgaggtagtagctgcttcaagagaagaaggtgctgctttcaaaaagaaaacagatactcacaaaatggcggaagcaaacaaagctttctcacacttcaaattctaatctgaaatgggaagagatcttaaatttacaagaaatattggtattgctgctcacattgatgcaggtaagactaccactacagaaaggattttattctatacaggtgtaaaccacaaaattggagaggttcacgatggtgcttctacaatggactggatggaacaggaagcagaaagaggtattactattacttctgctgcaactacttgtaactggaatttcccaacagatcaaggtaagaaattacctgaaacaaaaccttaccacttcaacattatcgatacaccgggacacgttgacttcactgtagaagtaaacagatctttgagagtattggacggtttggtattcttattctctgcagtagatggggtagagcctcagtctgaaacaaactggagacttgctgacaactacaaagttgcgagaatgggattcgtaaacaaaatggacagacagggtgctgacttcttgaacgttgtaaaacaagtaaaagaaatgttaggatctaatgcagttccaatcgttttaccaatcggtgctgaagaagatttcaaaggagttgtagacttaattaaaaacagagcgatcatctgggatgaagcaggacagggagcaacttatgaagtagttccgattcctgaagacatgaaggatgaagttcttgaatatagagagaaattagtagaagctgtagctgattatgatgagactttgatggagaaattcttcgaagatccggattcaatttctgaagaggaaatcaacgaagccttaagaaaagcgactatcgatctttctatcatcccaatgacttgtggatcttctttcaaaaacaaaggagtacagttcatgttggatgctgtttgtaaatatcttccttctccactagataaggataatatcaaaggaacagatccaagaactgacgctgatatcgaaagaaaaccatctgttgaggagcctttcgctgcattagctttcaaaattgctactgacccgttcgtaggtagattagcattcttcagagcttattcaggaagattggatgctggttcttatgtactaaacacaagatctggtaacaaagaaagaatctcaagaatctatcagatgcacgcaaacaagcaaaatccggttgagtatatcgaggctggagatattggtgctgctgtaggatttaaagatattaaaacaggagatacgttatctgatgaaaagaacccaatcgttcttgaatcaatgatcttcccggatccggtaatcggtattgctgttgagcctaaaacaaaagctgaccaggataaaatgggtaacgctttagctaaattagctgaagaagatccaacattccaggttaagacagatgaggcttcaggacaaacaatcatctctggtatgggtgagcttcacttggatatcatcgtagaccgtatgagaagagagttcaaagtagaggttaaccaaggtcagccgcaagtagaatacaaagaagctcttacacaaaaagccagccacagagaggtttacaaaaagcagtctggaggtagaggtaagttcgcggatatcgtattcgaaatcggtcctgcagacgaaggtaaaacaggtcttgaattcatcaacgaaattaaagggggtaacattcctaaggaatttgttccttcagttgaaaaaggattcagagaagcaatgaagaacggtcctttagctggatttgaggtagaatctatgaagattacattgaaagatggatcttaccaccaggttgactcggatcagttatctttcgaattggctgcgaagctaggtttcaaagaatctggtagagctgctaaagcggttatcatggaaccaatcatgaagcttgaagtagtaactcctgaagagtacatgggtgatatcgtaggtgaccttaacagaagaagaggtactgtaaacggtatggacgacagaaacaacgctaaagttatcaaggctttcgttccgctttctgaaatgtttggttatgtaacttctcttagaacgttatcttcaggtagagcaacatcttctatggaattcgagaaatacgaagctgctcctacaaacgttgctgaagaagtaatcgctaaggctaaaggttaatattaaattagattaaaatgtcacaaagaatcagaataaaacttaaatcttacgattacaacttggtagataaatctgcagagaaaatcgtaaaaacggtaaaggctactggtgctgttgtaaacggaccaattccattgccaaccaacaagagaatcttcacagtgttgagatctccgcacgtaaacaagaaagcaagagagcagttccagttatcagctcacaagagattgatggatatctactcttcttcttctaaaactgttgatgctctaatgaaattagaacttccttcaggtgtagatgttgaaattaaagtgtgataattgcatactttgcaatgattatataaaatccgttcctttcggggagcggattttttatgtattgtcatattttgtttttagaaacaaggtataaaatgtactgaatttaacattttgattatccaccaactcatctttttcggcggagtttttgatgctttaaatctcattaaaaccaacgaaaatggataagtcagataaaagttttttcgaaaaattttcagattgggcaacaaaatttacagggagttcttatgcttttatcggagctacgttaatcgttattatctggggtgcttcaggaccgatttttaagtactccgaaacatggcagctcgtaattaataccggaacaaccatcatcactttcctgatggtatttttaattcagaaggcacagaataaagactcaaaagccattcagatcaaattaaatgaattgatcgcggctaacgaaaaagccagcaacagaattgtggatattgaagatttaacggaaaaagaactcgatcagcttcattgttactatgaaaaactggcagattttgcagaagaagatgaagatatccattcttcacattctattgatgctgccaaaagaaatcaggattacaagcacgattttttcagaaaaaaacatgaagaatggctgcagaaacagaaacaaaaaaaggaatcgatctgattccttttttttattaaacattctatttcataaaatacccgaaataagaacagcttcccatcagattttttgcagtctccgtatcggcatactgcgttttcagcatggcaaaataggttctgtatttttggtttttaatctgatctaaattcttctggtaagaatcacttttctcactgtatttcggatccgaataatctacgttcgaaggatttttagtttcatactgataatatttcccctgttccgcacttgccatctgaaacagaattcttgctttctgttctttatccgttgatgtattcaatgcttttttataataattaattgccagatcaaaattatcaggttcaataaaagtagtatttgtaaagttcttgtagtagtactgatacggcgtttcactgtcggtgctccagaaattatattttccgccattcgtattgtcaacatccatcacaaataactgtctgtaatatcccaaagaagaagtattgtaaagaagatttccgatgagctgattggcttttgttgatctttcgtccttaccgtttcctatttttttaagctgaattaaagcatctgccaattcaagtttattcatcataggtttaatgaaagaaaactgagaaaaatcttccttcaccatactttcttcaggtgtactctgataactttcccaaacattatgtccgaaaacaagatccgaaatacttctgaaaccattgtattctgaagctccgtattgatgaggcgtttttttctgagaatttccgtcccagtcataattgattctaggaattcctgtgaaattctgtgcttttgtgtagtatgatttagctttctcaaaatcagcctgtctcatggctctgtcaccataaatcacggcaaaaaaggcatcgatatttcctacatcatcaatatttttagcaataatctgttcctcgaatttcgttttgttcggctttctataaaaatcttccacactttttaccagactggagttgggattgtactgaagatcagaaagcgtattgctcatcaggaaagattttccgtcttcaccctgcaggaaataacggttggcaagaacatctttcaggaaatcttttgtagaaggagcctcaccataataatcatattctgtttccgtactgtcttttttagttggttccggtttatccacaaaatattcggcataatctttcattaaatgatcttcgaaatctgcatcaattttaggctgcgaaacgatatcattcagaactttcattcttttaatctgttcctgatattcgggattgctggtttcaatgtctgataaaatctctgtactggctttataatctttcttaaggaacttcagataagcatctgcaatctgccagtattcgtccttagatttttctttcgttttgcttgtgaatttttccagatcatctaagaaatctttcgtctgatcgtcatagtaataattattcttgttgaaaaccggaattctgttcgggttgtccagcagttcatcgtcgctttgatcggctttcatttcagcactcgttttatctttaacaccgaatagcttcttaaaaaagcgcacaattttctgccagaacgatattttttcctctttaggagcttccgcagcctcagtttttggctgatccgctgtagttgtagtgtttgcagaaacttttacctcagatttttcattattattggtgtaataataaatcggaagatagtttctttccagttcattgatgctcctcaccgccatcactttcagaatttcagaatcaggatctatttcaaacattttttccatgatcggaatcggattgttgaaatcttcatagcctaaaagaaaataagccatgtttttttcttcattggttcccgctcttttcataatattattaaaagaagcagtatccgaaagtttcatagacacgaaggcagactctttgcggcttttactgttcataaaaacctgaaagaaattccagttggcatcacttttcagatccagtccgcgttgtgcacccgccaattgatcgagagccataaaataagtagctcctcttgattttatgggttcaacataattcttgaaagcttcaaccgctgcttcgtaatttcttgtataatggttgaaacgcaccaattgatatccgtaacgctgtttgatttcaggattttttgccgcattgtaaagagaggttaatgccgtgatggttttattgtaatcaagatttgttgcattttgtgaactttcgctttcacggtaataaaatgaatccggactttcaacgtagttgattttcatgtacggttcaagatattttgcctcaataagataatcaatcgcttccttatatttagaatagaaaccagatccgagttttgtaagaagctgattgttcgtgctgccatttttcagagcattcagatcattgatgttcattttattcaccagataatctgtctccgcaaaagtcagttgattattaaagaattttttccagacatccacattttcattaggaatctgggattgtttaaaatcagtataaaatctggtggaatagctgtgaagaaaaggcaggtaagatttatccttgatgatactctgtgtaaacagattgaaatattcataatccggatcagaccatgcgcacgcttcagttttactgtaaaaaagcgatagaaccgcgagcgaaagaaagtactttttcattttgttaatggtgtttttttaagtttataattttaatgaatgtatttttattttaaataaatcttacgctgatccgtttaagaaatctgtaagaactattcttttaagcataagacaatttacgcagaattttaattgaatttacaagttaaagttctgacctgtaacaaatttactgtctaactgataatatataatatcgaagttgcttatttttttctccagaaaatggataacttcctgaagctgctgatctgaaatttcttcaattttaattctgaaacctttgttcagataacttccgaaataaaatccgtccttttgtacttcaatttctgtgtcggatattcgcttgaaatcggggtttttaagatccttttcagatagagcattaatcagtttatgttttcccaaatgattggtgacaattccccacgaataaattggtaaggcaacctcaatttttttaacaggataatcttccagcttagaaaggtaatttttgagtgtactcacatcaagaatagaatttttatctgagttttccaacggtgaagaagtggagtagcacatcagaaatacctgctcaaccggtggaattcccatgatatttttatcttttacctgatgaagacgaagtgtacaggttaccgattttttagaaacttcctttaattttttcagaaatttaaaataatcatcgcgggttcctgcagtccagtcgcagtcaatttgtatttgattgccagtcttcaactgatattctgaagtcttttttgtaattaaatcattaatgcttgctgcaagaaactgtatttcctcattggtgatgttgagaaacgcacggtttgtaataaaaaccgtcggaacaatatttttgtcggtgctgaaactctgatcttttgtaataactccgacaggctgaaacttaccctccaatttatcaacatcaaaaaatcgggtgtataaataaggatcagttgctttatgtaaaacatctttctcagttttgtctaaagctaaacgggttttccagtagtaaaaagtgtacggatgagactgttttttaccacaggaaaagacgagaaataaaattaacagaagttgatagactttcatcattgatataatattcctgagcattcgcaatttgttttttccatttcagaaacaggacagcagtcgtcggatcttttcacttttccgttttcatccgtcagataaattctttctttatcgaatttcacgtagaatgtttcattataagttttaaaataaactttcatcactttcggatcatattttccggcattgatttcttctttggtttctgttccgtctgcctgattgatctgtacaaaaccgaaatagacatcgccgttatctttgatgttgatataatagcttggtgttcctgagccatttgttccatcttctatattgaaatcttttttccctgaaaaaggagctttcgactgtgcaaatgacaggaagcctaaaagaagtgtgagtagaaataaaagttttttcacaagtgaatttttcccaaaattaaaaatatcctatcaaaaattacaccgtaaaatcacggtaattacttttatacaagattttataaagtttaattttactctttgtttaacttagcgattaaactaaacgcaaagaaagacaaagaaaattcaaattattaacaccgtagatttagataagcaaaggcgtttcacttattttcgaaaaacaaagtttttttaataaaagcaaaaaaccacctcaaaaagagatggtttgtacatcactaacaattaatttttaaaataccgttgcagctaattgaattcttgcaaacttattggaaggattccacattgccatcatggaaacaggcaggctgtaatgatctgtgatttttacggtcttactagccttcatgcctacatttacaatatcaaaacttttttctccgtttccgtaaagaaatcttttgtcatttaaggcaaatccggctcctacaaacgcgtccagatttacttttttatctttaataataggataattcgcctgaatgtatgttgagtatttattctttttatatgttccgtcagattccagaaccacttctcctgcattagctcctccatacaacataatgtctgcttcaatatttaaaggaaaagaagctccaaaagtataattggttctcaaatcaataatgtgtgccgttctcctgttggaataattaaaaatatcttccgaagccaccgcagtgtttatatttcttgaattaaataaatcccataatccaatataaaatcttccgttggaaaactgtacatagtaattgatttctttataatgcgtattgtctttgtcgtccgttaaagcagatgcgccccaaattccgactttccattttttatctttatccagagcataagaaagatttcccattacaactggcttatcggtaataattaaacctctccaaagatggttattctgaatgtttgcggtaaaatccagtctgctttcttcctttgtttctgtgttttcctgggcaaaaagagttcctgtacctgataaaatcaggcataaatagattagttttttcataaagtaaagtgttgttagctcagaattccgtgaagtaacgcagcaagggcagctccgatgattggtcctgcaatgggaatccatgcataaccccaatcgctgcttccttttaccggaagaagagcatgcataattcttggtccgagatctcttgccggattaatggcgtagcctgtagttcctcctaaagaaagaccgattgcccagaccaataaagttaccggtaaagctcctacacttcctaatcctatttttgctgtcggatcattatttaaagtcatgcttggatctgcgaaatgaaaaatcacaaacaccaaaacgaaagtcccgatcatttcactgattaaattggaaacaggctttctgatggcaggtcctgtactgaaacatgcaagttttgccccttcgtcttccgtaatggcaaaatgatctttattgaaaatccaaaccaaagatgcacccaacattgccccgatcatttctccggcaatataggtgggaaccagatcccatgaaaattttcctgcaaaagccaatcctaaagtcactgcgggattcaggtgcgcgccgcttacggggcctgcaacggttacacccacaaaaactgccaaagcccaggcggtggtaataacgatccagccggagctgtttccttttgtgcctttcaaaacaacattggctactacgccgtttcctaaaagaatcatcagcattgtgccgattatttctgctgtaaatggagtcatagttttattttaaaaagattaatcttcgatccagttttgagaacgctgtactgcttttgtccacgttttcaccatcttttccactttttctttttccagttgcgggtggaaatctttatcaatgatccattgagactgtatttcatcaatgtttttccagtatccgaccgcaagtccggcaagataagctgctcccaaagcggttgtttccagagtttttggtcttgtaattttaaatccgaataaatccgactgaatctgcatcagtaaatcacttgcagaagctccgccgtctactcttaattccagactttccgttccggagtcagcttccattgcttttacaatatcatacacctgaaaagcaataccttccaaagtagctcttgcgatatgtccgtttgtggttccgcgggttaccccaacgatcgttccgcgggcatactgatcccagtgaggagcgcctaatcctgttaatgcaggaacaaaataaactccgccgttatcttcaaccgattgtgcaagtgtgtttacttcttccgcagaatgaattagttttaaaccgtctcttaaccattgaatcgctgcacctcctacaaaaacacttccttccaaagcgtaattcacttctccattaattttccatgcaacggtcgtcagtaaattgtttttagataaaacggcttctgttcctgtattcattaaaaggaaacagcctgttccatacgtattttttaccattcccggagtcgtacacatctgtccgaataatgcagcctgctgatctccagcaattcctgcaatcggaatttttgtggagaataatgtagtggctgtttctccgtagatttcactgctttgtttcacttctggtaaaatagctcttggaatgttgagcagttccagtaaatcctcgtcccattctaaagtatgaatattcaaaagcatggttctgcttgcattcgaaacatcggtgatgaacatctttccgcgcgtaagtttccagacaaggaaagtgtctactgttccgaaacataattttccggcttctgctttttctcttgcgccttctacattgtctaaaatccacttcagttttgttgctgaaaaataagcatccagtacaagacctgttttttctttaattttctcagcatgaccctgctcttttaattcgtcgcagtatttagatgttcttctgtcctgccatacaatggcattatatacaggttctccggtttctttatcccaaacaattgtggtttcacgctgattggtgattccgatagcggcaatttcccgaccggaaattcctgctttggcaatgacttccgccgctacggaaacctgtgaagaccagatttcattggggtcatgttctacccaacccggtgtaggaaatatctgttcaaaacttttctgagaaacaaattcaatttctccgctgtgattgaataaaatggctctcgacgaagtcgtaccttggtccagagcgagaatcaacttttcactcatgctgtgatcgtaaattaaggttaaatggatcttggagaataaggagtcagtagatatcctttcgccaattcgataaattctctttcctgttcatctgcccattctgcagaatgtccgttttcttttgcgatgatctgtgcaatcttgtgtgcgctgtcgattgctgctcttgcatctaaaaataaaagccggactcttcgtgctaaaatatcctcaatggtttgtgccatttcgcttcgtatcgcccagactgcttctgccatagtgaagggatgatcaggatgtattttttctgacaaatcaggattgttttgctgtagtttttttatttccggaatatcggctccgtacacatataaatgattcgttctgtccaccgtttcgggtttcacatttccatgaatcgaaaggtgttctgttttggaagtggttattcctagattatgaactttcattgcttcatcaatcgtgtcttccgccattttacggtaagtcgtccattttcctccgataatcgagatgagtcccgtatctgaggtaacgactttatgacttctggaaacttcttttgtgcttttgctgccatcttttggagctgcgagaggtctgagtcctgcgaaaacagattttacatcttctcgggttggctttttcgctaaatattgtcttgcggtattcaggacaaatttaatctcatcttccaaagctcttggctcaaaactttcgttttccagtaaagtatctgttgttcctaccaaagctctgtcgtgccacggaacgacaaataaaacccttccgtccgaagttttaggaatcatgattgcatcatcacttttcagaaacgatttatccagaaccaaatgaattccctgacttggaacgacgaattttccgtgtttcgggttattcatatttaaaatatcattcgtgaaaactccggttgcattgatgactactttcgctttgatttcgaattgttgttttgtaaactgatcttcagcaacaacaccgatgatcttattggagtcatttttcatcagattaatcacttttacgtaattaaccgctgttccgcctttttcgataatggtttgtgttaagttgatcgccagtcttgcatcgtcaaactgtccgtcctgataaaccactccgcttgccagacctttttgttcgatggtcggaagtttctctacggtctttgatttgctgatgtatttcgttcttcctaaactcagtttcccggcaagaaaatcgtaaatagaaagtcctattttataataaattccttcccaccaagtgtaatttggaataataaaagactggttttttacaacgtgtgctgcattttttgccagtaaacctctttcttttaaagcttctttcactaagccgatatctccctgtgctaaatatcttacgccgccgtgtaccagttttgtacttctgctggaagttgcttttgcaaaatcgtgagattctaacagtaacgttttaaaccctctgcttgtggcgtccagtgccgaacctaatccactcgctcctccgccaatgatgataaaatcccattctttaacggtggataatttgctgagttcttcgtttcgtttcataatatttcgttatgtttcgttttcaaagttataaattaaaaacgaaaccaaaaagaaaataaatgaaatttttcgaatcaaaataaaaatggtatttttgagaaaacgaaacgtaatggagaaattgcttccaaggcataatgatattttaaaggaattagacgaaaaagatcatattctggttcaggatctttgtgagaaattcaatgtttcgtcggttacgatccgaaaggatctgaattatcttgaaagtctgggattgcttttcagaaatcacggtggtgcgagtaaacaggtccggtatgcctacgaaaaaaatgttgatgaaaaggaaaatatcaatgtagaggctaaaaagaatattgcgaaaggtgcgctttctctgattcaggagaacgactgtattattctggcttcaggaaccacgatgcattatcttgcgcgtatgctggtaaattttggaccgttgacggttctcacttcttctttacgtgttgcgatcgagctttgcaataatccgaacattaatattatacaattgggaggggaggttagaaaaagttcaacttctattgtaggctccatctctgagacgattctgaaacatttctcgtgcaataaattatttttgggagtagacggaatcgatatgaatttcgggattagtacttcgaatgctgcggaagctcatcttaatcaattaatgattgaatgttcggataaagtagtgattctggcagattcttccaaactgaataaaaaaggtttcggaaaaatcgcagatctggataaaattgattttctgattacagatggtgatattttagacgaggataaaaataagcttgaagaaattggcgtgagtgttattgttaaataaatacggcgtaattttttaattcaaattattattgtcttgtttttctatattattcgcaattaattttgattatagaatgtttatttatatttttaagaacgcatatgcagtctccaatcataaaatataaataggatgtcttataaaattacattttttacttttttattcttttttacgcttgttaatttttccgctcaggaaaaggtaaatatcgatgatgttgaatccagatatgtatatcttttgaaatatcagattgattctctggataaatccagttctaatgaagagtattttattttggagaggggaaaagagaaatctcagtttatgggagtaacttcatataacagagattctttagctggtggagcaaaccgttttgcttttggtcttgatcctaaaagtttacctaaaaccaattttacttttcgcgtcattaaaaactttgaaaaaaacaatatttcttattatgattatattattaaggacaattttatttacgaagaaaagcctgattttaactggaagattaccggtgaaacaaaagaaataggaaatttaaaatgtcaggctgcgttggttacgtatgcgggacgtgattataaagcgtggttcacgaacgaaattccggtttctgatggtccttataaattttatggtcttccggggatgattgtggagattgaggattctaaaaaacaatatacgtttgagcttgtgagctataaaaccttttcagaaaagcttaagatgtggatttccaaaaagagagttaaaggaaaaacggtaaagaaatctgaattttataaagcatttaaaaattttcatgaaaatttcgtctctgaaattgctaaaggaggttttagtttcgattcaggaacagagcgacagataaaggataggattaaaaagaaaaataatccgattgaactggctccttaattattcagtgattaagtcacaccatttccttcttatggctatttctttcgtttttgcaaaaaagtctgtaaagtgaataattttgacatcatttaaaaactcgtgatcttaagatttttctgtaaatgattaaaaatcaaaatattttactgtaaatatttgtcagttataaaaatattcataaatttgcacactcattttaggggcgtagtatgcctatattcaaaagtagaaattacttcagacctccaaaaatggtgataaataaaggataaattttattataacataaacaatgtcaggtattattggtaaaaaaatcggtatgacttctttgtttgacgaagcagggaaaaatattccttgtacagttattcaggctggtccatgctcggttttacaggtcagaaccattgaaaaagacggttataagtcagttcaattaggtttcgatgacaagagtgagaagaacgttggtaaagcgttagctggtcatttcaaaaaggctggttctgctcctaaagctaaattggtagagttctacagagaattcgttgatgaagtaaaagtaggagaagaagtaaaggtagacttgttcaacgaaggagaattcgtagacgtaacaggtacttcaaaaggtaaaggcttccagggtgttgttaaaagacacggatttggaggtgtaatgcaggcaactcatggtcagcacaacagacttagagctccaggttctatcggtgcaggatctgacccttcaagagtattcaaagggatgagaatggctggaagaatgggaggtaagcaggtaactgtacaaaaccttcaggtattaaaagtggatcaagaacaaaatcttttagtagtaaaaggtgctgttccgggagctaaaaattcttatgtaattatcagaaaatggaactagtagtattaaatacatcaggaaaagagaccggaagaaaagtaactctagacgaaacagtattcggaattgagccaaatcagcacgcggtttacttagaagttaaacagtaccttgcagcacaaagacaagggactcataaagcaaaagaaagaagcgaaatcacagcttctactaaaaaacttaagaagcaaaaaggatctggttctgctagatatggtgatattaaatctccaactttcagaggaggaggtagagtattcggtccaaaaccaagagactacagattcaaattgaacaaagctcttaagagattagctaagaaatctgttttatctcagaaaatgagagacaacagcattaaagttttagaagatatgagcttcgaagctcctaagactaaagatttcattactttattagatgcattaacattaaacggtaaaaaatctttgttcattcttcctgaagctaacaagaatgtgtatttatcttcaagaaacttacctaagactaaagtaatgaacttcaacgaagtgagttcttacgatttagtaaacgcaggtgagatcgtattcttcgaaggtgcagtagaaaaattccaagaaaatttaaagaaataaatcatgtctattatcattaaaccagttatctcagaaaaggctaattaccttacagatttaagaggttcttattctttcttggtagatactaaggcgaataaaatccagattaagaaagctgtagaagcggcttatggtgtaaaagtagcagacgttaatacaatgatttatgctccgaaggtttcttcgaaatacactaaaaaaggtcttcaagtaggaaagacaaacaaattgaaaaaagcggtaatcaaacttgctgaaggtgaggttatcgatatttttgctgtaaattaattataattataaataatagtaatgtctgttagaaaattaaaacctatcaccccgggacagagattcagaattgtaaacaattttgaggaaattactactaacaaaccagagaaatctctaacagttggtattaaaaagtcaggtggacgtaaccaaacaggtaaaatgaccatgcgttacaccggaggtggacacaaaaagaaatacagaattattgacttcaaaagaaacaaagcaaacgttgaagcaactgtaaaatctgtagaatacgatccaaacagaactgcatttatcgctttattagagtacgcagacggagagaagagatatatcatcgctccaaacggtatcaaagtagaccaaaaagtagtttcaggtgaaagcgtagaaccaaatgtaggtaacgcaatgaaattgaaaaatattccattgggtactgtaatttcttgtgttgaaatgaagcctggtcaaggtgctattttagcaagaagtgctggttcttcagcgcaattaacttcaagagacgggaaatatgcaatcattaaattaccttcaggagaatccagaatgatccttactgaatgtatggcaatgattggatctgtttccaactctgatcaccaattaactgtatcaggtaaagctggtagaagcagatggttaggtagaagaccaagaacaagagcggtagtaatgaaccctgtagatcacccaatgggaggtggtgaaggacgttcttctggaggtcacccaagatctagaaacggtaaaccggctaaaggttacaaaactagaaagaaaaacaaagtgtctaaccgttacatcgtatctaaaagaaaataattatggcaagatcacttaagaaaggaccgttcattcatcatactttagataagaaggttcaggcaaatatagagtctggtaagaagacagttatcaaaacttggtctagagcatctatgatctctccggacttcgtaggacaaactattgctgtacacaacgggaaatcttttatccctgtttatgttacagaaaacatggttggtcacaagttaggcgaattttctccaacaagatctttcagaggtcatggtggtaacaaaaacaaaggaagcagataatcatgggatcaagaaaacaagatagcgcaatcgcaagaaaagaagctaacaaagacgttgttaaagcttcattaaataactgcccatcttctccaagaaaaatgagattagttgctgatatcattagaggagagcaagtagataaagctctttatatccttaaatattctaagaaagaagcttctaacaaattagaaaaattacttctttctgccattgctaactggcaagtgaaaaacgaaggggctgacattgaggaagcaaaccttatcgttaaagaaatattcgtggatagtgcaagacaattgaagagactaagaccagctccgcaaggtagagggtacagaatcagaaaaagatctaaccacgttacattaatcttaggtaataaagaaaactaaatcaaggtatgggacagaagacaaatccaattggtaacagattaggtatcatcagaggatgggattctaactggtttggcggaaacgattatggagacagaatcgcggaagactacaaaatcagaagataccttgaagctagattatctaaaggtgggatttcaagaatttatattgaaagaacattaaaattagtaacagttacaattactactgctagaccgggacttatcatcggtaaaggaggtcaggaagttgataaactgaaagaagagttgaaaaaattaactaaaaaggatattcagatcaacatcttcgaaatcaaaagaccagagcttgatgcagtattagttgcagacagcattgctaagcagattgaaaacagaatctcttacagaagagctgttaaaatggcgatggcaggtacaatgagaatgggtgcagaaggtatcaaagttcagatctctggtagattgaacggagctgaaatggcaagatcagaatctttcaaagaaggaagaattccattgtctactttcagagcagatatcgattaccacatcggtgaagcacttactcagtacggaaaactaggagtgaaagtttggatcatgaaaggtgaagtttacggtaaaagagaactttctccattagtgggacaacagaaaaaaggaggtcagtcagacagaagagataacagaggaggagacagagacaacagaagacctagaaaaaacaacaacaataacaataataattaaaattttagattagaaattttgaattttaaattaccgttacttttttaaaataaaaaaaatctaaaatctaaaatctaaaatctaaaatttagaaattatgttacaaccaaaaagaaccaagttccgtagagttcataagatgaaaatgaaggggaatgcccagagaggtagtcaacttgcttatggaactttcggaatcaaggcgacagaaggtgcttggatcactgcaagacaaattgaagctgctcgtatcgctgcgacaagatatatgaagagagagggacaactatggattaaaattttcccggataagccaattactaaaaaaccagcggaagtacgtatgggtaaaggtaaaggtgctgtggaatattgggtagctgtagtaaaaccaggtaaaattatgttcgaaatcggaggtgtaccttacgatatcgctaaggaagctttaagacttgctgcacaaaaattaccagtagttactaaattcatcgttgctaacgattttgttaaacctctttaatctttgaatacaatgaaaaaagctgatattaaaaatttaagcgcgggtgatattcaagctcaattaactgaagcaaaagctcaatattctaaattgaaattggctcatgcgatcagcccaattgaaaacccgatccaaatcagagatttgagaaaaacaatcgctagactaaacactgagttaactaacaaacaataatttcattttaaaatggatagaaatttaagaaaagaaagaatcggagtggtttccagcaataaaatggaaaaaactattgttgttagtgaaactacgagagtaaagcacccgatgtacggtaaattcgtattaaaaacgaaaaaatatactgcacacgacgagaacaacgaatgcgcagaaggagatacagttttaatccaagaaactagacctttgagcaagaacaagagatggagattagtaagaatcattgaaaaagctaagtaataatgttacaaacagaatcgagattaaaagttgctgataacacaggtgctaaagaagtattggttatcagagttctgggaggaaccagaagaagatatgcttcagttggtgataaaatcgttgttactatcaaagattctacgccatcaggaaacgctaagaaaggtcaggtatctaaagctgtagtagtaagaactaaaaaagcagttagaagaaaagatggttcatacatcaaattcgaagacaatgcttgtgtattgctaaacgcagcgggagaaatgagaggaactcgtgttttcggaccggttgctcgtgagttgagagacaaagaatatatgaaaatcatttcattagctcctgaagtactttaatatttaaaattgtaaaaaaatgtcaaagttaaaaataaaaagaggagataacgtaatcgtaactacaggtaagaaaggtcttaaaggtggtacaggtgaagttattgaagtgatcaaaaaagaaggaaaagaccctagagtagttgttgcaggacttaatattgttaaaaaacacgttaagccttcagcttcaaatcctcaaggaggaatcgttgaaagagaagcttctattcatatctcaaacgtagctttagttggaaaagacggaaaagctatcaaagtaggttacaaaatcgaaggagataagaaagtaagaatcaacaaaaaaacgggtgaaactttataattttaaataacacatggaatatatagcaagacccaaaaaagcatataaagaaacgattgttcctgcaatgatggaagaattcggatacaaatctgtaatgcaggtacctagattagagaaaattgttttatctcaaggtttaggagatgctacagcagacaaaaaaatcatcgattatgctgttgaagaattaacgaacatcactggtcagaaggctgtaggtacaatctctaagaaagacgaagctgctttcaaattgagaaaaggaatgcctgtaggtgctaaagttacactaagagcgaataaaatgtatgagttcttagacagattaacttcttctgctttgccaagaatcagagatttctctggaatcaaggctgatggtttcgacggtagaggaaactacaacttagggatcactgagcagatcatcttccctgagatcgtaattgataaagtgaaaaaaatccaggggatggacatcacttttgttactactgcaaaaacagataaagaagcaaaagcattattaactcacttcggtttaccatttaaaaagaactaagaaatggctaaagaatcaatgaaagcgcgtgagcgcaaaagagaagcactagttgctaaatacgctgctaaaagacaggctcttaaagaagctggtgattacgaaggacttcaaaaattgcctaaaaatgcttctcctgtaagattacacaacagatgtaaactaacaggtagaccaagaggatacatgagaacgttcggtatttccagagtaactttcagagaaatggcaaacaacggtcttatcccgggagttaaaaaagctagttggtaataattactaattaaaaatcgggacaattaagttgtctggatactaaagataaaaatatcagaccaagatttctgaggtctgatattttactcttcaagtccttacaatactgattgttctttaaccaataatttataaaagaaaaatggtaacagatccaatttcagatttcctaacaagagtaaggaacgcacaaagcgcaggccacaaagtggtggaaattcctgcatcgaaaatcaaaaaggagattactaagatcttattcgatcaggggtatatcttaaactacaagtttgaagatagcgctgttcagggtacgattaaaatcgctttaaagtacgataagcaaactaacaaaccagctatcaagtctattcaaagagcttctagaccaggtttaagacagtacaaaggttcaggagaacttccaagagtactaaacggtttgggtatttctatcatctctacttctaaaggagtaatgactgacaagaaagctagagaagaaaaagtaggcggtgaagtaatctgctatgtttattaatttttaatcacaggaaaatgtcaagaattggtaaagcaattataacagttccagcaggagttacaatcactgaaaaagatggtgtggtaactgtaaaaggtcctaaaggagaacttactcaggagcttacagcaggaattactatagaacagaaagatggagaactgaatgtaaacagaccatctgatgctaaacaacacaaagcgcttcacggtttatacagagcgttaatcaacaacatgattgttggtgtaaacacaggtttcgaaaagaaactggaattagtaggggtaggatacagagcttctcacgcaggtcaaaaacttgagttagctttaggattctctcacggtatcgtgcttgaacttccaaacgaagtaaaagtagatacattgactgaaaaaggtaaaaacccaattattactttaacgtctcacgacaaccaacttctagggatggtagctgcaaagatccgttctttcagaaagcctgaaccatacaaaggtaaaggggtaagattcgtaggagaaattgttagacgtaaagctggtaaatctgcttaataaattataagtattatggcattaagtaaattagaaaaaagaataagaatcaaaagaagagtaagaggaaaaatctccggatcttctgaattgccaagattatctgtatacaaaagtaataaggaaatttacgctcagttaatcgacgataacagtggaaaaactttggcttctgcttcttcaagagagaaaggagttgacgctaacggaactaagactgaagtttctgctgctgtaggtaaagctattgctgctaaagctatcgctgcaggaatcgaaaatattgtatttgatagaaacggattcgtatatcacgggagaattaaagctctagcggatggtgcgagagaaggtggacttaaattctaatcattaaatttcggaaaatatgttaggactagataatatagaaagagtaaaaccgggaggattagaacttaaagatcgtctcgtagctgttaacagagtaacaaaagtaactaaaggaggtagagctttcggattctctgctatcgtagttgtaggtaacgaagatggagttatcggttacggattaggaaaatctaaagaggttgcttctgcaattgctaaagcagttgaagatgctaagaaaaaccttgtgaaagttcctgtaatgaaccacacaattcctcaccagactactgctagatacggaggtgcagatatcttcttaagacctgcttctcacggtacaggtcttattgccggaggtgcggtaagagcggtattggagtctgctggtattcacgatatcctttcaaaatctaagggatcttctaaccctcacaacgtggtgaaagctactttcaaagcgttattggacatcagaagacctgaagaaatcgctagaatgagaggagtttctctaagtaaagtgtttaacggttaatatataaaacaatggcaacaatcaaagtaaagcaagtaagaagcgctattggaagaacaaaaacccaaaagagaacgcttgaagcattaggatttaagaaacttcaccaagttgtagaacacgaagctactccttctatcttaggaatgatagctgcagttagtcacttacttgaagttcaaaaataatttttaaaataattttaaaatgaatttaaacaacataaagccagctgcaggatctactttcaattcaaaaagaattggtagaggacaaggtagcggaaaaggaggtactgctactaaaggtcacaaaggacagaaagcaagagctggttattctcagaagatcggttttgaaggaggtcagatgcctttacaaagaagattacctaaattcggattcaaaaacgtaaacagaaaagagtttagaggagttaaccttgatacaatccagactttaattgaaaataaatctatcacaggagatattacaagagaagttatgattgagaatggtttaattactaaaaacgaattagtgaaaattatgggtagaggagaattgaaatctgcggtttcaatctctgctgacaaattcactaaatctgctgaagagcttatcgctaaagcaggtggaaaagcaattaccttataataatcactaatgaaagaatttatacaaaccctcaaaaatatttggagtcttaaagaacttagagataaaattctctttactttaggaattatccttgtgtatagattcgcatcttatatctcattacctgcaattaaccttgcggaagtaggggatctcttagagcattataaaaatcaaggcggtaacaagcaaggagcaggtctccttggcttgctttcgtcgtttacggggggagctttcagccacgcttccgtaatggcgttaggtatcatgccttatatttctgcttctattattgttcagttgatgggaatggctattccttatcttcagaagcttcagaaagatggagagtctggtagaaatacattgaaccagatcacaagatggttaacaatcggagtttgtcttgtacaggccccttcttatttaacatcgatcactcagttgtttttaccgtatgctcagttctcatctgcatattatgtagagccaaattctattatgttctggttgccaagtattgttattttggttgccggttcagtattcgcaatgtggttaggtgaaaaaatcaccgacaaaggtatcgggaatggtatctctatccttattatggtggggattctttcaagattaccggaagcattcgttcaggaaatggcagtgcagaacggaaaaggaggaatgggatctatcatgatccttattgaagtaattttctggatgttggttgttcttttagctgtggtattatccgtggctgttagaaaaatcccgatccagtatgtaagcagagctcaggcaagaggaggtgtaaacagaaatcttatgcagggagcgagacagtggatcccattgaaagtgaatgcagccggtgtaatgccgattatctttgctcaggcattgatgttcgtacctggtttattgacgaaagtagatgagtccaatacttttcttgcaggtttcaagaatgtttttagctggcagtacaacgtattgttcgcgctattaattattatcttctcgtttttctatactgcaattacaattccggtgaaccagatggctgatgatttgaagagaaacggaggtttagtaccgaaagtaagacccggaaaagagacggctgattatttagatgatattttatcaaaaattaccttgccaggtgcaatatttttgtctatctttgcaatccttccggcaattgtgcatggaacctttgttcagacagatgcgttcgccctatttttcgggggaacatcactattgattatggtgggagtaattttagataccgttcaacagattaatacttatctgctgaatcatcactatgatggcttaatgcagtctaaattatcaagaacgactggatattaatttatggcgaaacaaaaacatattgaacaagacggcgttattacggaagcactttcaaacgcccagttccgtgtagagcttgaaaatgggcatgtactcatcgctcatatttctggtaaaatgcgaatgcattatattaaacttttacctggtgataaggtgaaattggaaatgtctccctatgatttaacaaaagggagaattacatttagatattaaaaacaatctgccaaatggagcatccgttccatttggctattgttaaaaaataaatactatcaaaatgaaagtaagagcatcaattaaaaaaagaagcgctgattgcaaaatcgtacgcagaaaaggtgtactattcgtaatcaacaaaaagaacccaaaatttaaacaaagacaaggctaaaattaaattatggcgagaatttcaggtattgatttaccaaaaaacaaaagaggcgttatcggtttaacttacatctacggggtgggaagaagcactgcttcagaaatccttaaagctgccggtatcagcgaagacaagaaagtcaacgaatggaatgacgatgaattggctgcaatcagaacatacatctctgaaaacgtaaaagtagaaggagaattaagatctgaagtgcaattgaacattaagagattaatggacataggatgccaacgaggaatacgtcacagacttggattacctttaagaggccagagaacgaaaaacaactctagaacccgtaaaggaaagagaaaaactgttgctaacaagaaaaaagctagtaaataatcgttaggaattatggcaaaacaaactaaagtagttaagaaaagaaaagtaaaagttgaagctattggtgaagctcatattcaggcttctttcaataacatcatcatttctttaacaaataaaaacggagaggttatctcttgggcttctgccggtaaaatgggtttcagaggttctaaaaagaatactccatttgctgctcagatggcagctgaaaattgctctgctgtagctcacgaagctggattaagaagagtaaaggtgtttgtgaaaggtccgggagcaggtagagaatctgcaatcagatccatccacaattcaggaattgaagttagcgaaatcattgatgtgactcctatgccgcacaatggatgtagaccaccaaaaagaagaagagtttaatttttagaatttacccattatggcaagatatattggacctaaaactaagattgctagaaagtttggtgctgcaatctacggagatgacaaaaacttcgagaaaagaaaaaaccaaccgccaggacaacacggtcctaacaaaagaagaggtgctaaaaaatctgaatacgcagttcagttagctgaaaagcaaaaagctaaatatacttacggtattttagaaagacagtttgctaacctattcgacaaagcacacagaagtaaaggggtaacaggtgaagttctattacaactttgcgaatccagattggataacgtagtatacagattaggttttgctaaaacaagatctgctgctagacagcttgtttctcacagacacattactgtgaacggagagctggtaaatattccatcttatttgctaaaagcaggtgatgtaattgcggtaagagaaaagtctaagtctcttgaagtggttacaaacgcattagcttctaaagcaaattatgagtggttacaattcaacgatgagaagaaagaaggtactttcgtttctgctcctgagagaatccaaattccggaagacatcaaggaacagcttatcgtcgaactttactctaaataattttttaatcaaatttttgctcaacccaataatatggcaattttacaattcataaaacccgataaagtaattttacttaactctgatgaatttagaggtcagtttgaattcagaccactagaaccaggtttcgggcttacaatcggtaatgctttgagaagagtgttgctttcttctctggaaggatatgctatttcatctatcaaaatagaaggtgtagagcacgaattttcaactattccaggagtaatcgaagacgttaccgaaattattcttaaccttaagcaagtaagattaaaagctacggcagaaaaccagtctaatgagcaggttgttgccaaagtttcggggcagacggttattactgctggtgatttagggaagtctgtcaacggatttgaggtgctaaacccggatttggtgatctgcaacctgaacagtgatgtaactttcgaaattactttcaatatagaaaaaggaagagggtatgttccttctgaacaaaataagtcaaacaatgcaccggtaggtactattgcgatagactctattttcacgccaatcaagaaagtacagtatagcattgaaaattatcgtgtagagcaaaaaacagactacgaaaaacttgtattagatatagaaactgacggatctatcagtcctcagaatgctttaacagaagcttctaagatattaatttatcacttcatgctgttctctgatgagagaatcacgcttgaaacggaagccgtaaaagcatctatccaatatgatgaggaaactcttcatacaagacaactccttaagtctaaattagcagatatggatctttccgtaagagcccttaactgtctgaaagcggctgaagtggaaactcttggagaattggtttcttacagtaagtctgatttgatgaaattcagaaattttggtaaaaaatctttgacagaactagaagaattagtgcattcaaaaggtcttaacttcggtttcgacgttgcaaaatataagttagacgctgataaataattaataatgagacacggtaaaaaattcaatcacttaggaagaacagcttctcacagaagtgctatgctttctaatatggcttgttctctaattgagcataaaagaatcaacactactgtagctaaagctaaagctttgagagtatatgttgagcctctattaacaaaagcaaaagaagatactacacacaacagaagaattgttttttcatatcttcaaaataaagaagcagttgctgaattgttcagaactgtagctccaaaaatcgctgagagaaacggtggttatacaagaatcatcaagacaggattcagaccaggtgatgctgctgatactgctcttatcgaattggtagacttcaacgagctttacaatccaaatgcggaagagaaaaaagcgacaagaagaagcagaagatctgcaacagctaagaaagaagctgtagtagctgaagctcctgtagtagaagaaaaagctgctgagccaacggctgaagctgcagattctacagaagaaaaaactgaagaataatattcatcagatataaaaagaaaaaccgttcagattgctgaacggtttttttatgctttatattttggtttttacaagctgtatgatgttgttcccctgatcaagaattaagctgtccctttttaccgtagccttcatatccattttttcgtaagttgtttcatttcctttggattctactttatttaaaatgaaagttttattgttacttcttatgctcattgtcttttcttcataattaaaaaccacttttgcaaggcttccgtcggtggctttgtatacataatctgtttttatacttttcttgccattaatatccgtatcgtaacttatcgtagagtctactttgccgttatctgccaatatatcacccgaatcggaggcttttagaacatttttattcccttcttcactttttttgcagcttatcagcgacagagaaagcgctgaaacggcgatgaaaagtacatttttcatgatgttaatttttttaaggtattgattgttaaatattttcgtttgtaaaataattttcactaaatttagtaaaaacaaaaactaaaccaaatagccatgaactcaaactctgaatattacacaaaagggtaattgattctgttttgatttttgttgaaatttgtcttaaacaaaattaccgacatgagcatttccatagccatagtagaagacgaaaaaaactacaacaatgcgttgaagaaagtcatcaattatcaggatgacatgaaagtagttgcgcagttttttgatggaaatgaagctttgaaaaatctttctgacctttctccggatgtggtgatgatggatattcagttacaggatatgctcggtattgaaattattgaaaagcttaggaagggattgcctcaaacacagtttatcatgtgtaccagtttcgaggatgatgaaaaagtcttcaattccttaaaagccggcgcaatgggctatcttgtaaaaggcgaaagcatggataagatcctttcctcaataagagatgtctacaacggtggtgctcccatgagtttctcgattgcccgaaaagttctcagccacttcgaaagaaagctccccgaaatgaaaggctatgatgaacttacggaaagggaaaaggaagtactggaacttttatctcaaggactgctctacaaagaaatcgccgataagaaattcatcagcatcgataccgtgaaaaaacacgtcggaaacatttacagaaaactccacgttaataacaaagtggaggctattaataaatttaaccattttaaaaactaataattatggaagaaaaagaattaaatctgattttggaatcaattcaaaaggaatatgaaaatcaaaaactaaattcaaaagatctaaaattgattattgaactttgtaatactctaaaacttagagaagaaaatctatttaatcgatatattcaatatcaaaattttattactaataataaagatattaatggatttgatttttatgatatgagtaattttatgtatccaaaatattctaagccttttccacagaattccaatttacctgaagaatttattagtgaatttaaagaagaatttcaagataaatatgagaaaacatcacatatttattctaatattgcagacgaaattttttctaataatattcaagtaatcgtgatatatttagcgcagataagatcagagattttgctttgtattaaaagaaatgaagaatattatcagataaatgatgttgaagaattaacaaaaattgattctgcatggatagataattttgattcaacaactggattaggttctgctttagatacatatttggttaccagacgaccgaataaattaagaaatactagaaaatttgaaattactagaaatgtttatgaatatttaaaagataataatcatgaatcgattatactttttccggctatatgtatggacgatgatataaataatcccacaaaagaaagctataaacatcgatacacgtatatgataacttttggtgaaaaatcgttagattttagaacattagctgatattttaatatttgacagaaacggtctatgtcctcctggaacatgttagatattaatctgtatgataagatatattatcttatattagggatgaatttaattgtttccataatttataaaaaattatggaaacaattattttggctttattttatatttactattgtgatagagatatcaattactgttaaagctagttttatttcagataaatggtataattacttagatatattttgcatcgtttattttggatacatttttattaaggaaattaataattatatcattaaaataattactctgttcttttttattatcggtataatttctattctttattcaaaagatgatagtagttattatattgttacaggctatctctattgtatttttttaatccttatttcattatattggctttataaaaaaatatctagtgattatgtaacgaagaatattttagataacggttttttttggttaagttgttcattattattctggtcaccattttatatttttagaatgtatcctatgtattattttaataaggtagatgtcacatttttaactgagattgcgaaaatttttacatttattaatataattacatatttattatttatgaaagctttgttttgtataaaatgaaaacattaagtctgccaatagaaattaaaattatttacttaacagcgattattatgataatgctgtttatctgttttataatttttgttgttttaacatacaataagagacaacttcttaatttacgcgaaaaacaactccaacaatccgaacaccaaaaccagctcctccaaaaagagcttgaaaaacaaaaatccatagaagcagaacgggaaagaatttcccacgatatgcacgatgatctcggtgcaggaatttcagccctaaaactgcaggctgagtttttaaaacaacgggcagaaaatgacgatctgaaaaatgacattgatgaactcctgaaaacctctgaagaaatgaatctttccatgcgggaaatgctttggagcctcaattcaggaaatgatactttgggaagctttatcgattattcaaagatgtatgcacaaaattttttgaaaaaaacaaaaattctcctgctcacggaaagcgaaaacgttgttttggaaacgataatcaccacagaacagagacgaagtttatttctatgtttaaaagaagccctgaacaatgcttacaaacacagccagtccaatcagattaaattgtcattcatccagaaagacaaagaattcatgatgaaaatctccgacaacggaataggaattaaccacgaaaaatcagaaggaaacgggcttcgaaatatgaagcggagaatgcaggaacaaaacggacactgcgaagtcaccacggaaaacggaacacatctgtttttcagaatcgatttataagaaatttcaaatattgaatacaagcagcatcattttatggtgctgcttttattttaaatcacccttttgtgtaattgacagaggtttgtttttaaaggaactttggtgaacaacttaaaaattaatagccatgaaaactttaaatcagaaaaaatataactggactgctttactgctgatcttaatctgtgttttgggaggtgtgacactctattttatcggagagccaaaagataattctttatataaaaataaagttttaaaagatgactcggctcaggtagaaaaaatagaaattacccttcagaatcaaaataatgatattttgaaactaatggcggttactgaccaaccgaaagtaaaacctgttctggaacagaatttaaaggcaaacattaataaattcaaggaaatccaaaaagaaaaaaataccctaatctttccggaaaataaatcatcatacaatgcgccgttaaaattatgcatcattattattgtgtgtggtattttgggaggtttagccagtggatattatcggtatttagaagatatgctgcaagctaataatgaagttaaaaaggaagcattagaaatgaaggagttatgtgaaaaatttgaaaatcaaggtatcactgcttctgaagtaaaacccatgacagaagcgatacaaaatgtagaaaataaaatggaggtgttattagataagattgaagaggaaaagaataagtctgtctcaagaatacttttcggagtgatttcatctttttttgcagtcctcatcttaaaagcgggagatagtaaagtcttggaatttaatacctatctggattactttgtgtttgcgtgctactgtttgctttgtgccttgttttctaaaaaaattattgaaaccctcattaatacattcgtgaaaggaataggtgaacttaatgtagccaataataaaaaataaaaatgttcagacaggatattgtcgaaattcaaaatcccttcgataaaatttattaacatttaaaaacaaaatagccatgaaaactttaataacaactattgtaatatgtgtttttgcattttcaacttccttgatggcacaacacactaaggtcttaaaagtagatttgtcttctccggacaaagatgctgttacttttagagaagaagaaaatacaacagacaattctaaagtagattgtaaagaaagctatacaggaaaaggaaaaggaaaaggaaaaggaaaagaaaaagaaaaatgcacgaaaactgaaagccatagatggctttcagtaaggtctggagatttaattgcaatgaagcttgttaacgggaatcctttgaaatacaattacagagtaaatggagctccggttacactttttatgaataccgaaggaataaatgctcttaagattggggcagaagagaaagctgcagaagttccgaaagaagagtatgatgaacctacttacaaagaacttcctgcaaaaaatatagaattaaaggaaaatttagaaaaactagacctttctatagataagtttgaacttatctattcaaataaagaaagtttgggaaatgatttttttaaggaaagagacttgttattcgatcttgtgaaaaatcttcattatgaagcagaaaaatacaaatcttgttttgaaacaggtgaaaaaaaatatccaaaatcactttcagatgatgcaagagagaaagctagagtggatgtaaaattcaattttgataaagcaacagctattttgaaaaattttgaaggtaaatttttcttttcaaatgaattttacaccttgccgatggaacatcagggaaagaacatagatgctatagaatttaccgttaagagaattaacaaaacaaataattctgaggatgaaaatttttccagcaaatacaaagtttggataacaggaggtcttaaaatagatattagtgcaggtattttccttacaagtttgtttgatgatgtttatgaaaccaaagatggaacagatgctgcaaaaaaaatgattcttaagaaaaatgcgggtaaatatgattttgcagtgggctcaactataaatacaggctttagaattaattcatgggtgcagccaaatctgaattttggatttattttcacacaaaatcaaaaatttcaacttgctcttggtttaggtttagtacttggaaaagaagaaagatggattctttctggcggtcttataatgggcgttgtagacagattaagagacggctatggtgatggaggacaatatagtttaggtgcagatggacaaattcctatggtaaaacaatttaaattcggtcacttcttcgggattacttataatctttcaaaagtaaatacaatttcatttaaataaaaaatatcatgattactttaaaaaacaaaaagcctgtagatataaatgatctatcttatgatgaattatttgaaaatctacagggaaatatcctaaaaggacacggcagaaattttacagcacacatctttgtaagattttacagaaataacaagactgacgcaaagcaatggctgaaaaatttttcagaacagatcacctcctgtaaaaagcagttgaaagaaactatgcaattcaaaaaaaatggtgtttccggtggtgtatttctcgggctttatcttacgcgtgagggatatgattatctgggagcgaatgctaattttttatccagtatgaaggatgctaaactgaatgatcctgatgttaaagactgggaagaaggatatcaggaaaatattcatgcaatgcttctgattggtgatgatgattacgacactgttcagaaacaaaaacaggtttttatagaagagttaaatcatttttcacaaattctgaaaatagagaatggaaatgtcattagaaatagcgatggagatggtattgagcatttcggatatgcggatggaattagccagcctctctttttcaaggaagagatagaagagtacaaagaaaaatattctggaaatctagtgtttaatccggaattttcattatcacaggtactgtataaagatccctttacagataatgataatgcatacggtagttttcttgtcttcagaaaactggaacaggatgtaaaaggctttaaaaaacaggaaaggcatattgctgaaatgatgaatttggaagatgatgaaattgtgggagcagtaatggtaggaagatttgaagatggaacacctcatattttatcaaaaaaagatggaattatagataatcttaccaataacttcaattatccgagtggttccgaaggaaaatgtccttttctaagccatatccgcgctacaaatgaacgtgataaagattcccgtaccatgattatggcaagaagagcaataccttatggacgcgttaccgacattgaagacacaaaagagaaaaagggacttttgtttatgagctttcagagtaatattcagaatcagtttgaagcatcccagttgagagccaataatatgaaagatccaattataggacaaaatgatgtcttcgtcgccaatgcttcatgttttggagaaaaaccggaaaatgaagaaactgaaaaagtaaacttccggagtttcgtaaccttaaaaggtggagaatatttttttgctccatcaattgattatctgaagaatctttaaaattaactaaaatttaactcacaataaccccataaattcccattcatttgctttaaaaagttaaaaattgattaaatttgtctgaactataaaaaaacgaacaatgagttacatttcttacatagaagcgagacaaattttggattcaagaggaaatcctacagttgaagtagatgtattcacggaaagtggtgcgatgggacgtgctgcggtaccttccggagcttctactggagaacatgaagcggtggaattgcgcgatggcggttcagaatatatggggaaaggtgttcttaaagcggttgagaatgtaagagaagtgattgcgcccgagttggtaggtcttcctgtatacgatcagaaccttatcgaccagattatgatcgatcttgacggaaccaataataaaggaaatcttggagcaaatgcaattcttggtgtttctttggcagcagctaaagcagcagcagcagaattgaaaatgcctttgtacaaatatgttggcggtgtcaatgcaaacacacttcctgttccgatgatgaacgtgatcaacggaggttctcactccgatgcgccgattgcgtttcaggaatttatgatcatgccggtaaaagcagattctttctctcacgcattgagaaaaggaactgaaattttccacaaccttaaatcgattcttcattcaagaggtctgtctactgcggtaggtgatgaaggaggtttcgcaccaactttcaaaggaactgaagatgctttggatactttgcttcaggctattgaaaaagcagggtacaaaccgggtgacgatattatgttggcgcttgactgtgctgcttctgaattctacaaagacggaatctacgattacagaaaattccagacgccggatgccgctcagttctcaagcagcgagcaggtttcttaccttgctgaattggcagccaaatatccgatcatttcaattgaagacggaatgcaggaaaatgactgggaaggctggaaaatgttaaccgataaaatcggagacagagtacagttggtaggagacgatttattcgtaaccaatgttgaaagactgtcaagaggagtaaaagaaggaattgcaaactcaatcttggtaaaagtaaaccagatcggatccctttctgaaacaatggcagcggtacaaatggcgcagaacaacagattcacttctgtaatgtctcacagatcaggagaaactgaagactctacaatcgcagatttagcagtagcaatgaattgcggacagattaaaacaggatccgcttcaagatcagacagaatggcgaaatacaaccagctgttgagaattgaagaagctcttggtgaaaccgcagttttcccgggcttagatgcttttaaaatcaaaagataattaatcgaatttataaataacggcaagcgaaatttttagtttgccgtattttgtaataagtagtatatttagaaaaaaataaattaaataatgtcagacaacaaggtaatattgaattacgacggtaattcatatgaatatccaattgtggatagtactatcggagacagaggaatcgatatttcaaaattaagagaccagacaggtctaatcactcttgatttagggtataagaacaccggagctacacttagtgacatcacttacttagacggagacaaaggagaattattctacagaggatatccgatcgagcagatcgctgagaaatccaacttcacagaagtgatgtatcttttattacacggtgaattgccttctcaggatcagtacaattctttcgaatcaaacattaaaaaatataatttcgtagcagaggagatgaaaaagatcatggatgctttccctcgttctgctcacccaatgggagttttatcttctttaacttctgcgttaacggcatttaatccaaaagcagttaacgtaaattctaaagaagaaatggatcatgctgcagaattgttaattgcaaaattctctcacctttgcgcatggacgtacagaaaaactcagggattgcctcttaatcacggagacaacagcctgaactatgtagaaaacttctacaaaatggctttcagaatgccaaaccaggaatttgaaatcgatcctgttgtagtaggtgctttagataaattattaattcttcacgcagatcacgagcaaaactgttctacttctacagtaagaatggttggttctgcgcatacaggtcttttcgcttcagtttctgcaggggtttctgcactttggggaccacttcacggtggagcaaaccaggcggttatcgaaatgcttgaactgattgaaaaagatggaggagatgtatctaaatacattgcgaaagcaaaagataaaaacgataacttccgtttaatgggattcggacacagagtatacaaaaacttcgacccaagagcaaaaatcatcaagaaagctgctgacgatattcttaatgcattaggaattcaggataaagcacttgatattgcaatgcagttggaaagagtagctcttgaagacgaatacttcgtagaaagaaaactatatccaaacgtagatttctattcaggaattatttacagagcattaggaattcctacagaaatgttcaccgtaatgtttgcattaggaagattaccgggatggatttctcagtggaaagaaatgagactgaaaggagatccgatcggaagaccaagacaggtatatcaaggggctccaaaaagagactatatcgatatggttaacagataatcaatatcttactataaacaaaaatcccgaagcttgctttgggattttttttatttaatataaatgaatatacgcttctttttaaagggtataaaaaataaaacctgcttcaaaagcaggctttaagtctaattttctgttatggacattgacatctgtcacaagtccagagtgtgcatgcgcctgtttcataatcatattcgcagcagcgtcttgcagcagatgctcctccgataatcgatttttgctgttctcttcctagtttttgtgcttttaaaagcacagatttttttgtgttcatgatgttttttggtgtttgattgttaatgttttatgttttaatttctacagaaattatatcactaatataggaattttaattaaaactttttacattttatcaaaaaataattcataaccaattattgtgaataaaattatctgataaaatcgcttatttaagtgaataaatgctttagtctatcaatctgctgaagtaaaaaactgtaagaagattatttcatagatttatattgcgcagatcgcctaaaaacaggacaaaagtttcccagattcagtcctttacttatatttgtagcattgcataaatctttatgaagctaaatataaaaaacgaaacgggcaggctgaaatcagtggttttaggacaacccaattcaatgggagcagttcctacattagaggaaagttatgatgcaaagtcgtatcattctatcgaaaataacatttatccgaaagaatcggatatcatccatgaaatgaacgcttttgaagcggttttaaaaaaatatgacgtagaagttcttcgtccggacatcattgcagattacaatcaggtttttgcaagagacgtcgcctttgtaattgatgataaaatgattatctctaacgttattgcagaccgcgcagacgaacaggaagcttataaaacggtttttgaaaaagtggcgtggagaaaaataattaatcttccggaaacagcacacattgaaggtggagatgttattgtctgggacgattttctgtttatcggaacatgtttcagtgaagattacagaagttataaaacggcaagaaccaacgaatacgccatcgaaattctgaaagaatactttcctaaaaaaagaatcatcgatctggaactgaaaaagaacgacagaataccgtacgaaggaattttacatctggattgtacattcaaccccattggaaaagataaatgtattatttacaaagacgggtttgtagacgaaagcgattaccgactgattattgatattttcggggaagaaaactgtttccacgttacggcggaggaaatgtttgaaatgttcccgaatattttttcaatctctccggaaatcgtagtttccgacaaagcattcacaagaatgaacaatcacctcagaaacgcatggggaatgaccgttgaagaaattccataccgcgaaatttctaaaatgggaggacttttacgttgctcgacaatgccattagtaagagagtagctgagtttgagagtctgagtgttttagagttagagagttttggggctgagttgttgttattttttctattttagcttaaaatacaaagatgtcaacaattaaatttcaccaagatttaaaggtgtttcaaaagtaagtagaatttgcgatgataatttttgaactcacaaaatcttttcctaaagaagaactctactctcttacagatcaaataaggcgttcgtcacgatccgtttcggcaaatataagcgaggcttggggaaaaagaaagtatgaaaaatctttcgtcgcaaagcttacagattcggaaggagaagcaagagaaacccaaacatggctcttgtacgcatggaaatgcaaatatataaatgaagaacagtttattagtttaaataaacaatacaatcaaataatcgggatgttggtcaatatgatgagtcagtcacagaattggtgtacattttcctcaacagataaaaagtaaaaagtaactttcactaaaacactaaaacactaaaacactaaaactcaaaacactctcaaacccaaaacaccctcaaacccaaagtatgcagacaacagatacagtactaatgatagagccgattgcattcggatttaatgcagaaacggcaaaaaacaattattttcaggtagagcagaaaggtttcgatacccagtttaaagctttgtcagaatttaaagcttttgttgaaagattgagaagcaaaggaattaacgtcatcacagtaaaagatacattagatcctcacactccggattctattttcccgaacaactgggtaagttttcataaagacggaaaagtagttttatatccgatgtttgcttccaacagaagagtagaaagaagagacgatatcattgaaaccattaaagaacagggatttgaagtcgctgaaatcgatgactggtcttttcctgaaacacagggacactttctggaaggaacaggaagcatgatctttgatcacgataacaaaattgcttacggttcggtttctttaagactggatgaaaacctgttcagagaattttgtgagaagtatggttttacgccggttgtcttccattcattccaaaccgttggagaagaaagacttccgatttaccacaccaacgtgatgatgtgtgtagcagataaatttgtggtaatctgtctggattgtatagatgatgaactcgaaagaagcaaagtcattgaaaccattaaaaattcaggaaaagaaatcattgaaatttctgaagagcagatgcagcagtttgccggaaatatgcttcaggtaaataataaagacggacagaaatttttggtgatgagtgaaaccgcttataaatctttacatcaggatcaggtttcagcaattgaaaagtattgtgagattatctactcagacttaaataccattgaagtaaacggaggcggaagtgcacgttgtatgcttgcagaagttttcttaccaaaaaaataatatatttgctgaaaatacattgaattggaatcattaaccagcaaaggtttacatattcttctgactttggaaacggagtcagaagctttgttaatagacggtgacggtttcttagcatttaccaaagatatgctcgcaacaaaagacgtggaaattgtaggaattaccagtcatatttttgaaaataaaagctttacttccgcggtttgtcttaaagaatctcacctttgtattcatacgtggccggaatttaaacaactcacttttgatgtttttctctgcaattatctgcaggataacacagaaaaagttgaaaaaattgcagatgaagtaatagactattttaaagctaaaaccattcagaaacacaaaatttacagataaaaaatgttttacgtttgtcccgcctgcgaatccggaaataaactggatcttactttcgatataaaagaatatgtctgtaagacctgttcttatcttattgatgtcgaaaataataaacatcagaaacacatcaaagttcctacagaaaatgttgtattggatatcgggcagaaaggaatcatcgacaatacagaatataccgttaccggaattatcatccgaaaatacggaaccagtatcttttggagagaatattatttaaaagatacaaaaggagaagatgctttcttaagtgagagtgatggacactggacttttcttcatatcattaatgcaatggatgtaaagaaaaagatgaacggaaaagcagtggaactgcacggaagaaattaccggtggtatgaaactacagaatgcaccattcattctgctgcaggtttttttgaagataaactgaatttcggactggcaacatacaaggaatatgtgaatgcaactcagatgatttcccaagagcagtcgaagggaaaaattgaattcttcttcggcaaacacatctcaaaatacaaagtaaaaaaagcgttcgggatttctaaccttcccaattactcaggaataggaattgttcagccgttttatgtaaatgtaaagcacaccattaatattatggcggtttcggcattactaattagtctgatccaattgtatgtagtcgggacgagaaccaataaatcggttttcgagcaggaaattaattttgcagatgtccgcaataaagaaatggtcagcaaaagctttgatttatcaggcggttctgccccgttaaaagttgaggtatattccaatgtggataattcatgggcaaatgtcggtttaggattggtgaacgagaaaaccaacgaaattgtgtttgcttcaaaagacatcgaagaataccacggttatgaagacggtgaaaactggagcgaaggaaggcgggatgaaagttttaatttctgcggagttgctcccggaaaataccactttattatttcggcagaaaaacaggaaactccaaaggttatgcctccatcatattacgccacccaagacggaagtttaaccttatccagagataacaacggaaccattaatgttaccaacaacaatacgatggaaacaacggctttcggagactctaaaatgataaaggaagacacagtaagcagcctcggacagtttgttcatcagacgttaggaaaagcggatatcgactcccttttgaataccaatcttgcagccggagcgacaacaccagagttaaccgacaacaaatctgttaaaattaaagcagaatggcttcctgtctctttcaggaattttgtgtttattcttttgtttatcatcgggtttgtcgcagcagtctggttcggaagaaaatctttcgaaagatcaaaatggtacaacagttcaaattcaccttacacctactcataaacgatggaaactatcattaactacataaaagaacactggattctctgtcttatcggagtgttttttgtcggctggtttacttatctcacttttgacggcaaccagttctgcgactgcgaaaaaacagaaacctacagagacggaaccacaagaagacactactcttccggagtgggctattacagatactatcacaaataaaatctaaaattatggatcagatcaactttttaccggtcatcaattcagtcatttattccttcttgggaattgcaatcctgctggtttgctatctaattattgaaaaattaacgccggaaaaaacatggcacgaaatcgctcacaataaaaatactgctttggcgattattttcggagcatttatcatcgggatttcaattatcataagcgcagcgattcatggataaaaagaggattcctcttgaactgctgctcatgttttcggtgtttgtcatcgcaacctgcggactgatctacgaattggtggcgggagctttggcgagctatcttttgggcgattccgtaaaacagttttccttcatcatcggagtctatcttttttcgatgggagtcggatcgtattttgccaaattcatcaaaggaaatttaattgataaattcatagaaattgaaattctggtcggaatcatcggcggaataagctctgtgattttatttattctgtttaacactttggctcattttgaagccgttttatacctttttgtattttttacaggctgtctggtcggagtagaaattccgcttttaatgaatatcttaaaagacagggttcagtttaaagatttggtatccaatgttttcgcatttgattatatcggagcattgctggcttccattttatttccactggtcttgattccgcaattgggaatcgtaaaaacgcctttattttttggtttggttaatatttcaattgccatatttttgtgcttttatctgaaaaatgaactttcaaaaccagtttcattaagagttaaatcaatcggagcctttcttttacttgttattctctttattttttcggacagaattttatcattttcggaagagaaattatacggcgaaaatgtcgtttacaccaaaagttcgccctaccagagaatcgttttaaccagaaacagccgcgaattcagattatatttgaataacaatctgcagttttcttcagtagacgaataccgttatcacgaagcgttggttcatcctgccatgtcgatggctaaaaagattgatcatattttaattctcggcggtggagacggtttcgcagttcgtgaagttttaaaatacaaagaagtaaaagacatcactctggtggatttggatggagaaatgacaaattttttcaggaataatgaaaccatgcgccaattgaatcaaagctctttatccaatctaaaactgaaagtaatcaacaaagacgcttatatctggataaaagaaaactctaaaaagtacgatgttatcattatcgattttccggatccgtccaattacagcttaggaaaattatattccttacagttttacagagaactcgaaagactcaccactttagatacaaaaattgtggttcagactacttctccctattttgctccaaaatctttctggtgtattgagaaaacaattaacgaggtctttccttttacttccgcgtatcacacgtatgttccgtcattcggagaatggggattttcaatggcttcctttgagccgatcaacaataaaatctatcgtaaaattccgaatctgaaattttatgattacaatttctcacagctttcttactttacgaaagatatgaaaaccaaagatattgaagtcaatcgattggataaccagattttagtacggtattttgatgaagaatggggtaaagttcaatagaaaagtgtcaattatttattatatttgtatcataaattgatacttaaattgtaaaaacatgatagctgaaattgaaaaatatatagaaatccagaacaacatcgatcagattctgaaagattcaccatttaaaatttcttacattattgaaaaaaccggaattaaaaaacccacctttttcaaaaaaatgaaagaaaaaagatttacttccgaagaactgctttctattgccaaagtaatggagcctatttatagaaatgaaacccatgaagagattttagaatcgttgaaaaaatccgaagaagatttcagaatgggaagaacgatatctcaccaggaattaatgaagcaggctcgtgcaaaattagaacagcgtaagaatgagggtagaatacagtgatctttccaaaaaggatttcaaagagcttcaaaattatctcttcgatcattttaaaattctggttttcagaaaaattttggataaatatgaaaaagctataaattttgccaactcaacccactcaattttccagaaaagatttccttaaaaccatgttcttgggcagtctcatgattccttttttacactattgcagtaaaaaaggcaaatcgttattacttaaaatcaccggaaccaatcatattttagggcacaaactctgggcgaaggattttcctcaacctacacaagaaactcgcacaaaatacctcgttgtcggcggaggaatttcaggactttcggcgtgtagatttttcagtcagcatcaggaaaacaattatctgttgctcgaaatggaaaaccatttaggcggaaactcgtcgaatggacagaacaaattttcaaaatttcctttaggagcgcattatttgccattgccgaataaagaaaatactgaaatcatccaatttctgaaagaatgccaaatttatcagggagacgatgaaaatggcgatccgattttagacgaatatcagatgactttcccgcaacaggaacggttattttttaaaaattcatggcaaaatgatatcgttccgcaaaacggaatttccacagaaacaaaagcggaatttgactggttttttaaaatgatggatcactttcagcataaaaaagatgcagaaggaaaatattggtttgccattccggttcacgattccagtcgggaagatgaggttttacaattagagaaaattattttcagagactggctgaaacaagaaaattttacatctgaagaattactctggctgttggattattcctgtcgcgatgattacggtttgggaatcaattatgtttcagcttgggctggaattcattatttcgccggaagaaaaaataactggagcaaaaaatacaaagatcaggttttcacatggccggaaggaaatgctcgtttggcaaaacatttttcaaaatatacagaagaaaaatctttacagaatcatctggtttttgatgtgaagatcaatgataacgatgttgaggttttaagtttcgacaatattcagaaaaagacaaaaaagatcattgctgaaaaagttctgttcgcgactccgcaattcgtcaacgaaagaattttcaacaataaaagggctgaacattttaactatgttccgtggcttttaacaacgattactttacaaaacgatttcggtggagatgaagaattggcttgggataacgtaatttacggttctgatggtttaggctatatttacgatcagcatcagaatgtaaaccagattatgggtgaaaaagtgattacctactacagaagtttttccaccaatgactgtaaaaaagcaagaaaaaaattatacggtctgaaagaagatcagttgaaaagcattgttttggaagatttaaaaaaagcccatcctatgatcgaagattttatcctcgaaatgcagtttcacaaaatcggtcatgcgatgattgcgccggttccgaaccagatttttggaaattccgaaatggcaaaacagccggttgacggaaaagttttctttgcccattctgatctttcaggaatttcaattttcgaggaagctttttatcagggatggagaaccgcgaaagagatgcaacaatttgattaatattaaaataagaattcaaacctaacaggtttttaaaacctgttaggtttcccaaaaataaaaatgaaacaaccctggatccataacgcaaaaacagacggctggtttatcctgtcgccgcctttcattattttgctgattgttttcttatttcagaaacagattcagggactggaaaatcattattccttttacacatggctttttctcatagttttcgtagatgttgcgcacgtgtattcaaccttatttaaaacgtatttcgttaaagaagaagtcaggaaaagaaaacttttatattacggaattcctgccttgagctggattttaggattgattttataccagttcggaagtcttacgttttggtcggtgttagctttgattgctgtttttcattttatcaggcagcaatatgggttcatgagaatttatgccagatttgaaccaaataattggagtaaaaaattggatgaaattgcggtgtattctgccacgatttttccgatgttgtattggtttaaaacacccagagcttttacgtggtttgtacaaaatgaattcaactggcttcaacatcttccggattatattccagtcattaagattttatatttcgggattttaatgatttggctattcaaaactattttcgaaatctttaaaaccggacaattcaatattccaaaaattgccttaatttcagggacttatctttcgtggtatttcggaattgtttatttcaataacgatttggttttcactttcctgaatgtgatttcacacggaattccttacgttgctttaatttacatcagagaaattcaacaaaaagacgatcaaaatctaaaccgtctttctttattcaaatctgctttcgggatatttttgtttattctcgttattcttgcttttgcatttttcgaagagtttttatgggaaatattggtttggaacgaacatttttcattacatctgaatgtttcagtaaattggtttcagtttttggtccctttattggtcgttcctcagcttacgcattatttattggatggctttatttggagaaaaccgaaaaaagttaactaattttgtattcaaagttaaaaatatgaaaatgcagaagtgcctcctttcattcatgcttttgttgggatttttcagtttaaatgctcagcagaagacattttgtaacccgattaatatcgattacgggtatactccgttcgaagttttttcaaaacagggaaaacaccgtgcaacagccgatccggtgattgttaattttaaaaacaagctctttcttttttccaccaatcaggaaggatactggtacagcgacgatatgctcgactggaagtttgtccaccgaaaatttttaagagacaataaatatacccacgatctgaacgctcctgcagtttgggcaatgaaagatacgttatacgttttcggatctacatgggaacaggatttcccgatctggaaaagtaccaatcccaccaaagacgactggaaaattgccgttgatactttaaaagtcggagcatgggatcctgcatttcattacgatgaagataaaaacaagctgtacttgtattggggatcaagcaatgaatggccattgttgggaaccgaagtaaaagtaaatacccttcagtcggaaggttttgtaaagccgaccatcaggttaaaaccggaagatcatggttgggaaagattcggggaatataatgacaatgttttcttgcagccttttgtagaaggagcgtggatgacgaagcataacggaaaatattatcttcagtacggagctcctgcaacggaattcagcggatattcggatggagtgtatgtgagtaataagcctttggaaggttttgaatatcaacagcacaatccgttttcttacaaaccgggaggttttgcaagaggagcaggacacggtgcaacgtttgaggataattacaaaaactggtggcacatttctaccatttttatttcaacaaaaaataattttgaaagacgtttgggaatctggcctgccggatttgataaagatgatgtaatgtattgcaacacggcttatggagattatccaacgtatcttccgcaatacgcacagggaaaagatttctctaaaggactttttgcaggttggatgctactgaattacaataagccggttcaggtttcatcgactttaggcggttatcattccaattatgcggtggatgaagatattaaaacgtactggagtgccaaaacaggaaattccggagagtggtttcagacggatttaggagaggtttctaccatcaatgccattcagatcaattatgccgatcaggatgttgagtttatgggaaaaacactgggtaaaatgcatcagtataaaatctatggttccgatgacggtaaaaaatggaatgttattgtggataaaagcaaaaacaccaaagatgttcctcatgattatgtagaattggaaaaacctgccaaagcaagatttctgaaaatggaaaatctgaaaatgccaaccggaaaatttgcattaagcggattcagagtttttggaaaaggcgcaggaactgttcccggaaaagttcagaattttgttccgttgagatctgatcctaaaaaatacggcgaaagaagaagcatctggatgaaatggcagcagaattccgatgcagacggatatgttatttattggggaaaatctcctgaaaaattgtacggaagcattatggtgtacggaaaaaacgaatatttcttcaccggagccgatagagcggatgcatattatttccagattgaagctttcaatgcgaatggagtttcagaaagatcggaaatttttaagtctgaataaaatattaataaacgctttgagtttttcagagcgtttattttttgtcgatattcttcataaatccctcaattttgttaaccagaaaatctccattggaagactgatcccagccgagatgatctccagtaaattcataggattcatgatacactttattttttgatagaaccgagtccagcgttttcttttgagacattggaacaacatgatcattaacaccgtaataagaaagggtaggagcggaagttggagtaatccagtaaaccggacttccaaagtccattagcgttgttttgctgtcaacgattttaggatcaatcaaatgtttttctacgaaagcataatcctcataatttttaaatcctgaatcgttcagatcagtgggaccgacgatattgataactgcttttacctttctgtccggatcaaatttataagcatacaacattgctaaatgtccgcccgcgctgtttccgagaagaatatatttgggatgaatttttaagtttttttctaaaccattcatggcaatggcaatatcatctgtttgattcggaagagcaaaacgcttggatgaagcaagcctgtaatccagattgacaaaaatatgttcaggaaattttttcatcagatcataagtgaaatccgtaagctgagatcttcttccgccgcgccaaccgccgccatgaataatgataaaagcatctttatcttttaaagaagctttaggagtataaacgtccattttctgttccctgtcttttccataagaaacatttttttctatggtaaaagattttccatttccgaagtcaatggtgttttgtttacaatttaaaagtgtaagaagaaataaacctgttaaaacatttaaacgactcttcatcattgaattttaattaaaaataaaaaaaactcgccgatttctcagcgagtttaccacaaaaaatgatttatatgaagaaatgattgttatcttgttctgtttttaatttcgtctgaagcactttcgatgtttcttacttttttcactttctggtttccgaaattgtaagtaatgcttacattaatgcttcttctgtactggtcgtttctaatgtagttatagtttccggaagcctgtaaatcttcaatttccacgacattggttcttaaaacatcattcagatttaccgcaaacgtccagtcgttccagtttttcttaatgttcagatctaaacttgctaagtttttcagcataccaagttctatctgctgtttatccacatagaagaaatttacgcctaagaaccatgttttctttttgtctaaacggatggtgttgttgctggtaatcaacatacttgcagattttctgttgtttacataagtatcaaaaacctgtcctgttgtaggatctgtatctaatgttccgttgttgatgttatactgtacccccgcattgaagtttaatgtaagatattgcttgaataaagatttctgaattcccagcatcgcagacatttcctgcttgtctccgaaattggttctgatgtaggctaactgaactcttttctgattggttttcggatcgatatagcttctctgcagcggaacctgcgtaatctggtctttttcataggtatgattcaaaatcaggaaataagaatttttgtacatatacgttagctcctgattataggtagaagacgcttttacgaaaggattattctgggtataattatcttccgtaataagattttttacaggattcagttcccaaaagctgggtcttctcattcggcttgaaaatgaataagatatattgttcttatcattaatagcataattgaaacttaaataaggtaaaagattattataatttctttcgatctgctgattggtttctacattgtttttccaactgtctgcggttcctaagctgttcgtgatttcgtatctggctccgatttttcctgaaaacttatccgaaaactttttttcaaaagttacatacaggccataaatattttcattgtaaacaaaatggttaaaatcattttgagaagctaactggttgccggaaagatcgtatggatatgaataatttttggtgtcgttgtcagtttttgttttattgtaatttcctccggcagagaatgtaaaatcgtttttaaatttctgaatataatccaccgtcccggaaaaattattgataacctgcggaagatcctgaattattttgctgctgttttggttgaaatttcctgtcgcatcctgaatcagcgtgttgttattcgtgtactgaaatcttttataattaagataagctgcattcacgttcagtttgcttcctaaagaatcaagctttacttcatagtttaaatttacagaattgttatagcttcttgcgtcctctttatttttggttttagtataagcggttgaaagtatattgccgttagtatcatattttgtaatcgtgttcatcagatcaatcgtagaattgtagcttttgtttgcccatgtattccatgataaagccagattacttttgtcattcaactgataatcaatattcagatatcctcctaaatttttgtttggatcatcaatattccctacagattcattctgtacattttcagatcggtttctcagaacatatgcttgcggattgatattttcgccaccactaagattcgcattaattcccagtttgtcttttctgtaatttatagagaaactggcgttgcttgcattgtatttactctgggtattagacattctcatgtttccgctggttccgtcgctcatttttttcttcagcacgatattgatgatcccatcggaagattccacctgatattcacttcccggaactgtaatcacttcaattttctggatattttctgcgggtgtatttttcagaaactgaaccagagattccgcatccatattactttttctgccgttaatgtagatcagcgcattgttctttcctgcaatctttagcgttttatcatctgttgtagacaaaaggggagtctgcttcagaatatcgaacgtcgtatttccttttgcaatgggagatgcagcaacatcatatacaaaacggtcgctttgttttttgaaaacctgcttggttaaagtaactccttctatgctttttgtttttacagtatcctttttagtttgctgagcgaaagataatccactgaagaatatagctgcgataagaatgggcgttttcatgttttataattttagagagtttttaatagcttgtatttgttattatttaacattgcaaagatatataataaattaagtatcttgcaatacaaagtacttaaaatgtttttaaataaaatttaactaattgattttcagttaataaaattttagattaaattttttgcttttgttcctttgctgtcaataagacaattttgaacatgattgtattacatttcgggataaaatttctgaaatgtcatggtgtaataaaaagaaaaaagagccgaaatggttctttttattgaatttattctctgtcgaaacgggctaattttttatcaatccagatggtggcaaacgggaagaaagcggcaattaaggcaaaaacgctgtcttcatcatcccacacgtaaatttttctgaccgcgggtaaaaagatcagataaagagaaaaaaagaaaccgtgaatacttccgatggtactgatgtagacaataggaagaatttcatcgggattggtacggatccagatcatagccgtgaaaagaaaaaaccacgaaactgcttctgcaaggcagatattcttaaaccatctgatgactttttcctgtggatattttaaaaataatttttctaagaaattcataaattttacatatcattaattcaggactaataagaaacctccagcttccatcttcctgcatcggcttatcaaagctaaattacttataaaaactgcttccatccaaataatcaaaaacttcgggaggaagcatcggtcttacgtttttgccgcttttaatcatgttacggatttctgttgcggaaagctcaataaccggcgcgttgattagagaaatattttcgtgttgaagatattcagaatctttcttttcaccttcaaaaactctcggataaacaatgatatgatgattcttaatcaaggtttcagcattcttccatttgtgtaggctttccagattgtcttctcccatgattaaactaaaagaatagtcgggatatttctcatgaagataagtcagcgtgtcaatcgtgtaacttggctgcggaagcgaaaactccacatttgaagcacgcattctcgggtaattttttacggcaagttgcaccatatccagtcggttatgatcttttaacaaagattttttttctttaaaaggattttgcggacttaccacaaaccacaattcatccatatcggaattttccagaatataattggctaaaattaaatgaccaatatgaatggggttaaacgaaccgaaaaataaaccaatttttttcataaaaaacttctaatccctgaattgtacatctttaatattcagataatgtgtgacatttcctttccagtgattttcttccagtgtaaaggctagatcaaaatatttatttctgaaatcatctgcaaactgtcctaatttgaagcctacacattcaatatttcttccggtggactcctgcttaatgtagaatttaagatgattattatctttccccattgttttaatataccccgaaattttctgattggttaaggtaagaatcggtttcatattgtgaggtccgaaaggagctaattttcggtgaaaattgataaattctctgttaatttcatcaatctgaatttccgagtcaatcgtaatcgaaggctctttctgatgttcttttattttttcagagacaacacgttcaaatttttctttaaaagccgcaaatttttctttctccatggaaagtcctgctgcagcatgatgtcctccgaattttaagaaatattccgaacacatatccagtgcttcgtgaacatcaaaatctgaaacggatctcgccgaagccaccatttccccattattgccatcggtaaaaacaagggttggtttgtaataggtttcaatcagtcttgaagctacaattcctatcactcctttattccattccggatgataaacgatggtggtatattttgtttcctgctgagattcaataacctgattcaaagcagaaagagtagaattcatatccagttcacgcctttcatcgttaagattcatgatgtcgcttacaatctgatgggcgtgtttcaggttatccgaaaccataagttcaacggctgcttttccgtgcgaaattcttccggcagcgttaattttaggcgcaatttcaaacacaatatttgaaatttcaaaatgagaaagcttgtcttcaggaattaataatcttaatcctaaatttcgggtttttcgaagggttttcagtcccattttagccaaaaccctgttttctccggtcattgaaacgatatctgcagcaatggaaatcgcaagaagatctgttaattcaaacagttctgcttcaggaagtttataaatggtattgagcccctgacaaagtttaaagcctactccgcaaccggaaagttctttgaaaggataacggcagtcgcttcttttcggatccagaacagcaacagcgtcaggaatttcttcgccgggtaaatggtgatcgcagatgataaaatcgatatccagacttttggcatagcggatcatatctaatgctttgattccgcagtctaaagcgataatcagagaaaaaccgttttctttggcaaagtcgattccttcggtagaaattccgtacccttcagaatttctgtcgggaatatagtaatctaaatattttttctgaacaattttgctgaggtacagatacatcagtgcaacggcagttgttccgtccacgtcataatctccgtacaccaatattttttctccattctcaattgcagtggcaatccgctctacagctttttgcatatctgccattaaaaacggactgtgaatgtcgttaaggttgggtttaaaaaattctcttgccttttgataattgtcaattcctctgagaacgaggagtttagattcaaaagttccaaaaccaagagacgaacttaatccatccacaatttcctcatcgggttcgggcttgtaaatccatttttgactcatttcacaaaaatagggaattataatttaaaagaaaagtttattgttgaaggggaagtgttaaaaaaaaccgttcagcagttgaacggtttttaaatatttttaagaatacattttctctcttaattcttttactttcttatcagcaagatattcatcgtaagtcatttctctgtcgataattccgtttggagtaagttcgatgattctgttacagactgtggaaagcatttcgtggtcatgagaagccaataagatatttcctttaaagttagacagtgagttgttcaatgtcgtgatactttcaaggtctaagtggttggttggttcatccagtaaaagaacgttggctttctgaagcatcattctgctgaacatacatctcattttttcacctcctgaaagcactttacaggattttaaagcttcatcaccggagaaaagcattcttcccaaaaatcctcttacgaattcttcatgacgctcttcatcatttttcgtgaattgtcttagccaatcaaccaaacttaaatcttcctgaaagaaatttgtattatctaaaggcatatgagactggtttgtagtaactccccaagcaacagctcctttgtctgcttctacgtttccggctaaaatttcgaaaaattctgtgattgccaatgaatttttagacaaaacagcaactttatctccttttttaagatttaaatcgatgtttgagaataataattctccgtcttttgttttttcaagaccttttacatctaaaatctgatctcccgcctctctttccatttcgaaaataatggcaggatatcttcttgaagacggtttgatatcatcgatgtttagtttatcaatcattttctttctcgcagtagcctgtttcgctttcgcaacgtttgagctgaatcttgcgatgaagtcctgaagttctttcttcttttcctccgcttttttattagcctgagctctttgtctcgttgctaattgagaagcctgataccagaaagagtagttaccggtgtaaagatttaatttagcataatccaagtcaccgatgtgcgtacaaaccgtgtctaagaagtgacggtcgtgagatacaacgattactgtgttttcgtaatctgctaagaaatcttccagccaagagatcgtatcgatgtcaaggtcgttcgtaggctcatccagaataagtacatccggatttccgaaaagcgcctgagccaaaagtacctttactttgtctttgttctcaagttcgctcatcatttgccagtgcatatcatctttaatacctacgttggaaagcatggtctgtgcatcagattctgcagtccatcctcccatttcatcgtagattacgcctaattctccggctttaataccgtcttcatcagagaagtcttccttcgcgtaaagcgcgtccatctcttcttttatctcgaataatttcttgttacctctcaaaaccgcttcaagcacagtaaattgatcataagcaaagtgatcctgctccagaacagacattctttttccaggttccaaagatacgtgtcctgttgtcgggtcctgctttcctgttaatattttaaggaatgtagactttcctgcaccatttgctccgataattccgtagcagtttcctttcgtaaacataatgtttacctcgtcaaaaagaactcttttcccgaattgtaaagataagttagatactgttaacatatagttttgtaaatttggcgcaaaaatacgaaaagaatttgggtatttcgcaatattgtaatagtcaggtttttaaatgtggggtattttttatatatttcattcattaaattaataaaacgcagaaaaaaaaattcagaaaagataaatttcacctgcaactttattaaatttttacatcttacaaatacaaaaggattttaaaatgaagattgaaaaaacagtcaatatattaaaccgaagagccagatttgaatatgaaattctggaagaatacgaagcgggaatggttttaacaggtacggaaataaaatctttgcgttcttcaaaagcatctatcgcagaatcgttctgtcagtttattgatggggaattgtacatcattaatatgatgatcgatgagtacaaattaggaactttttacaatcataaaacaaaaagggaacggaaattgctcttgcacaaaaaagagttacagaaattagaaaaaaagttaaaggatgcagggaacactattatacctcttaaattatatatcaatgacaggggaaaagcaaaggttctcatagcgttgggtagaggtaaaaaactcttcgataaaagggagagcataaaagatagagaaaataaacgaaacctcgacagaatattaaagaaaagttaaaaatcatctgaaaaactttgtatataaagaaaaattatatttattttgcattatcaattatttaatcatttaattctatgaaaaatctaaaattaggaatttcagcattggcacttactgttgcttctactgtgttcgctcagactaccaacaatccgtggttgatcggggttggtgctcacgcggaaaaccatatggcacagagaacaaacttcagtaacacgttctctgctaataatttgacgaagacaatgttcaatatgaacaacttctctattactccgccattatcaaaacttactgtagctaggaacatcggtaaaggtttggtaatcgactggcagacgactgtaggtaatgttgaaaacaaaagattcaacatgggtaaagagtttatgttgatgacaggtttaggtttccaggcgaaggctgcaggtcttctttgggacgaagaatcttggtttgatccatatttaagagttggtgctaactatttgagacacgattatacttctcttactttccctagaacggatgctaacggagaatatgttacaaatggtgacaacggtaacgaaaacggtaaagctaacttctttacagttgctactggtgcaggtgttaacttctggttaactaaaaacttcggtttaggtattcagggagattacgtatcaactccgggagacaaatctaacgttgctaacttctggcaagcttcagcttctttgaactttagatttggtaacagagatagagataaagatggtatcttagataaagacgatttatgtccagatacaccaggtttaccagaattccaaggatgtcctgatactgatggtgatggagttccagataaagacgatcaatgtccagatgttgctggtccagttgaaaacaacggatgcccttggccagatactgatggtgacggtgtaatcgacaaagatgatgcttgtcctacagttgcaggtcctgctgaaaacaacggttgtccttggccagatacagacggagacggaatcttagataaagatgatgcttgtcctacagttccaggtcttccagaatacaatggatgtcctaagcctaaagctgtaacagctaaaactgttgaagagaaattaggaagtgtattctttgatttcaataaagctactatcaaggctgagtctaaaccagcattagatgaagctgctgatctaatcaagaaagatggtggtaactatctattagaaggtagaactgatgctaaaggatctgaagcttacaacttgaaattatctagagaaagagctgctgctgtagttgctgctttagatgcaagaggtgtagatgctaacgctctaaaatcaatcggtgtaggtaaagctaaagctactgtacctgcaacagcttctgatattgaaagacaagttgacagaaaagtagttgtaactgctatcgaagatgcggctcaatggaatgctcttaagaaaagagactacgaagatccaactccggtaaaagtagttaagaaaaaagctccagctaagaaaaaagctccagctaaaaaaagaaaataattaaatttttctaaatataaatacctccagttctctggaggtatttttttttcgttcacttttgagtaattttgttgaaaattaaaaatataaaatgggaagagcgtttgaatatagaaaagcttctaaaatggccagatgggacaaaatggctaagactttttctaaaataggtaaagatattgcactggcagtaaaagcaggaggtgcagatccggaatctaatcctgcattaagaagatgcatacagaatgcgaaaggtgcaaacatgccaaaagataacgtagaaagagcgattaaaaaggcaagtggtgcagatgcagaaaactatgaagaaattacttacgaaggttacggacaaggtggtgttgcttttttcgtagaatgtactacaaacaatacaacaagaactgttgccaatgtaagagctattttcaataagtttgatggaaaccttggtaaaaatggcgagttagctttcatcttcgacagaaaagggattttcacgatcgatttagctcaaattaaaatggactgggacgatttcgaaatggaaatgattgacggcggagcagaagacgtagaaaaagacgaagaagaagtaatgattacaacagctttcgaagatttcggttctttatctcacaagcttgatgaactgggaattgaggcaaaaagcgcagaacttcagagaattccgaacaatacaaaagaagtaaacgaagagcagttcaaggcaaatatgaaaatgcttgagcgtttcgaagacgatgatgacgtgcaaaacgtgtatcataatatggaaattacagaagagttgatggaaactctctaaaaaatagtagttgtccggaatttatcatcaataaaaaactttgggttctttgctgagtgaaacgcctttgcgagcttaaaaagcggttaatatttaaaaacttgtgcgaacttagcgttaaaattaagcattatgataaattaaggataagtaaaaaaataatataacattcatatacagttaactttcaagtagtttctttgcataaaactatgaaaagaaacgtcgaattagttgttatatcggatgttcatttgggaacttacggatgtaaggctaaagaattactgcgatatcttaattctattcagcctaaaactttagttttgaatggagatattatcgatatctggcaattcaaaaagtcttacttccctaaaccccatttaaaggtcatcaaaaagatattgtcctttgccacaaaaaacacagatgttttctacattaccggaaatcatgacgagatgttccggaagtttaccgacttccaactgggtaaacttaaagtctgtaataaaatctgtttagacatcgacaataaaaaaacatggatctttcacggagatgtgttcgatgcctctgttcagcattcgaaatggattgctaaactgggaggaaaaggctacgatttattaattgtgattaataatgttgtgaattggtttttggagaaaatgggaaaagaaaaatattcattttcaaaaaaaattaaaaacaatgtgaagaaagcggtaaaatacattggggattttgagctgactgcttccgaacttgccatcgacaatcattacgattacgtagtttgcggacatattcatcagccgcagattcgagaggtgattaataaaaaaggttcctgcacgtatcttaattccggtgactggatcgaaaatctttctgcactggaatacaataataacgagtggaagattttttattatgacgaacataaagattctttaaaagatgataccgcagaggaaattcaggaaattgacagtgatgagcttttaaaaatagtaaccaatttcagccaatgagaattttatacgcctttcagggaacaggaaacggacacgtcgcacgtgcgcaggaaatcgttccgatcctgaaaaaatatgcatcagttgatactttgatcagcggacatcagtcgcagttaaaggcagatttcgacattaattttaaacacaaaggtgtttcccttctttacgataaaacaggcggtttatcctaccggaaaacgtttacaaataatagttttttagaagccttcaaagcgattcgcgaaattgagctttctcagtacgatttagtcatcaacgattatgaacctttaacgggatgggcttgtaaattcaaaaaacatccgatgatagaactcagtcatcaggcttccatgttgtttaaagaaacgccgaaaccggataaaaaagattttttcggagaaatggtgctgaaatattatgttccgagcgaaagaaaaattggtttccacttcgaaaattatcatcctcagataaaaaagccggtcatcagaaggaaaatccgaaacttaaatcccaacaaaaaaggtttttatctggtgtatcttccgagtttttcggatgaaaatatcattaaagttttaaagcagattccggtagaatggaaagttttttccaaatattccaaattgcagtttaaggaaaataatgttgaaatttttccgattgatgaaattcaatacttaaaagcatttgaaaactgcgatggtattctctgcaatgcaggtttcgaaagtcccgcagaagcactttttatggataaaaaactgttcgtaattcctattcataatcaatatgaacaggaatgcaatgcatgcgctttagacaaaatgggaataccgaattctaatgtattgaagcttgaagaaatacagaactgggtaaactccgatcagcatctgaaagtagattatcccgatgatattgaggaaatcttggtgaatgaagtgttaacgctgtaaaaaaatatcttccacatctttcattctcatcatcacagatcgcgcgtaagaacagtgcgggtagactttccagttgttttcgcgggcaaactttatggcttcttctaccagatattttcccattccgcgaccttcaaattcagggtgaaccagaacgaaggaaataatgaatttgctgtcttcggggaaaatagtgtacgttaatcttccgatttcttttacttcattatttaaagtaattacaccgccgtttcccgatttattattttcaaatctcataacttaaacttttatgaagcataaaatacaaaaactgcaccgcgaaaggttatttgtattttgcgatttctgcttttagtgtttcaatctctgcttccagtttatcgatgtattttttctgagattcccacaaagaaagcggaatgttgtaattattggtatttccaataccatttccgttacctgtagaattatcattaaatataaaaactaaactttcttcattttcaaaaatgtcttcaattggaacgtccaatacttcagcgattttctgccattccggtaaagaaatttttgccgttcctttctctcttcggttgtagttggaaacatccatagaaaggatgtctgccattctttcctggctgatgtttcttcttttgcgggcttcgatgagttttgttttttccatttctgtaaagtttagtgtaaagataaattttttgcgaaaaatcgcaataaaatcgcaaaaagaaaattgtatttacttgtactaaatttttatttttgatctgtttaacacataaaaaaaacaattatgaaaaaattattttatgtagtactatgcgtacttacactatcaattgtgctttattgttcagatgaaaactcatttaataacaactcaacagcacccacaaaaaaaatctcaaataaaactacggcaagagaagcaggtgattttaattttacaaaaggaggagatctaaatcttacaagtgctgaaatttcaagcctttatcagctttgttctaatgagacagattattctaatataaaaagagttcttctatataccgcaggaaatgagaatggagaacaaccgataaatgttgataaattaagaggaatttcattttataagtatagaaatggatttcttgaacattcgttttataaaaacaacaatggaatattcgaaaaagtcgatgatcttaccttaaatacatcaacaaagcttcctatgcaagatattgattttattattcgctattccagtttaacaaccaatcaactaacagtatattcttctttaaatcctgcttattcaaacctttcacttcaagattccaatgaatttaaagattttttagcgtgggattttggttcacatgttaaattacaaaagacaatgttagatgtagaaaatagaattgctcctcaaggtaaatgtggaaaatgtacagagaatacaacaggagattgtcaatgggatttaagtccggaaaatggaggttggtgtgatccaaaaatagaggtgtcttgtagattttcatttataaaatctttattatctgtaaatccaaagtataatgttctatttaatcaaacaaaagcttatgaagttagagatcaactattatcaaaaagtttatttgggcagaaatatcaagcatattattatttaacaagctttggaacaatagattttgatttcaacgactctgtagagctagcaagtttattgcctgaaatttacaaagcttatgatacttatcaaaataataatattgagcaaattgttataacaaatgattttgcagcacagctaatttctgtaattgataagatgaaggctaaaaatacagacaaaaaatattttgttaaaattttggatgatatcgcagatgatattaattttataaaaaacaaaaatgttggagaaatcaaaagtaaaatattttagctattatttcctattacttccgtttgtattgggtgtattatacatttcaattcaatttctggttgtttattgcattttcaaggatagtgattatgatattctttttacgataacttcctgtttactattatccttaattacattaggattgactctgtgttttaaggaaagaagccagtttgtaaaagatttttcagaatatgtcattattttatacgtttcctgcttattgtcatttattattcatttttggagattcaattttggaacgatccgccgttgtgcatataattttgatatttcagaagttaaaaacatttataatttaacaatatgttttacaacaataattaatgtaatctttttttatataataagatacaatagattgaaatttaaaagattatatgtaatactatttattttagctatgattgctcaatttttctttacacgtcattttagaatgatataagacaaacaaaagagggctttctaaaatttagatgccctcttatcatttcacaaagattcacattgtaagatttctacagtttacaaagcaaaatctaatgaatatggaacagaatatcttattgaaatcctgaataatattaacattataaaaaactaaaatgccggaaagatcaaatttaaattatttcgcatatcatttcttttggcttcctgtaacggtgggagcgctgtatatttctattcagtattttgtggtgtaccatcttctgaattttgggaattatgatattctttttacaataacgtcctgtttgcttctgtcgttcataaatttaggttttgccctcattggtaaagaaagaaaccagtttgtaaaagatttttcagaatacgtcatcattttatacttctcgtgtatgttgtcttttttcattcacttttgcaggttcaattttggaacggtaaggcgttgcgcttttgatcttgatatttctgaagtgaaaaatatgcatgatgtggcgatactttttacatccgttatcaacatcatttttctttgcctcatccgtagatataaactaaaaattagagtattgcattttgtcttgttgattttggcgatgattgctcagttcttttatacgcgtagttttagaatgatttagtttgaatattatgtcatttcgactaaggagaaatctattaatataatagtagagatgctttcagcatgacaaactttgttccggattatctaaacgcaaagtttttattttgagaatgaatatattaaggttacaaagtgaaggcagatttcatctgctaagaagcgcgcttcatcatccgtctgcgacggagtatctttgcttttctttaatgaggtgaaaactttttcctttgcgtttagattgcagtttctaaatcaataaaaaaatgtttgtataagcatttcatgttttttacagaatcttctgctaaatcagcaaaatctgcgggaacttttacacattgttctgtcatttcgacgaaggagaaatctattaaatataattgtagagatgctttcagcagacaaactttgttccggattatctaagcgcaaagcttttgttttgagaatgaatatatttaggcagcaaagtgaaggcagatttcatctgctaagaagcgcgcttcatcatccgtctgcgacggagtatctttgcttctctttaatgaggtgaaaacttttttctttgcgtttagattgcagttttcaaatcaataaaaaattttttgcataagcatccgatggttttttcagaatcatctgcaaaatccgcaaaatctgcgggagcttttataagcagagtggttttaaaatattttaaaatcatcttcctaactatctttccccgtataataattgtaatccttaataacaaccccgatgaactgtctttccgtcattttggtaggatctacttccagcttcagaattcctttaattttatcggaaagtttgctgatgatttgtcggtcgtccactcttaaagctttcagataattatctttgatgattctcatgtcattatcgcttaaagcaatgacctgcggaaaagtaggaacataatcttctttaatgttttccagaatcgtatgcgaaatattgatgttgttttttaaagaaataacggcggttcctgatgcaatatctcccaaacgctggttgtttttggaaacaatggcagagataagaccaataatagaaatatcaatgatcctgaaaacccagcgaatcatataatctccgaatcccgcctgataaccgtcgattttcaccacacggattttcatgactttttttcccggagtctgcccctccatcaggctttccagaacaagcggataaatcgcagtcgggaaaagaagaatgctgtaaatagcaataatcgaccactgatccagcccgtccatcacatatcccagattcagaatattgaaaaaaagatacagaatagcgatggtgtacgcaatttgaataagaagatcgataatataagcaagaagtctttctccaacacccgcaatgttgaaattaatatttacattttgtgaagtatttatcgcgatttgagacattatttttattattttagccttacaattatgagagaagtttatttcattaaacaaaataaagaaaaatggttgggaatagaacaggttattcaggggaaaattaaaaaaaatcctgatgatctctcttcgctgtacatcaacctcgttaacgacctttcttttgcacagacgtattacccgaaaagtaataccacggtttatcttaaccatttgtctgcacagatcttccagaaaatttataaaaccaaaagggtagaagaaaacaggtttctgcatttcttcaaaaccgaagttcctttgctggtgtatcagtacagaagatatttgggatatgcttttttgttttttactttatttacgctaatcggtctgctttccggaatttacgataaagattttgccaaagttattctgggtgaagaatatgtgaaccagaccattgaaaacattaaggcaggaaatgcggtaggagtttaccagagcggttctacatggggaagtacaatcgggattattttcaacaatataaaagttggtgcaagactgtacatctacggaattgcaggtggagtaggaacgttatgggcattgctgaacaacagcgtgatgctcggttctttccagtatttcttttatgattacggtgcactgaaggacagcgcaagaggaatctggcttcacggagtttttgaaatttttgcgatggtagtggaagcgatgtgcggtcttattctgggagcctctattttatttccgaaaacactgtccagatttaattctttcaaaagcggatttaaagattcattcaaaatattccttagtactgttccttttaccatctgtgcaggaattattgaaggatatgtaacaagacacgccctgaaaatgcctttaattttaaatttaattattattttcgggtctttggcaatcatcgggttttattactgtatttatccgtctgttgtcagcaaaaaaattaataaccagattcaggatgcagttttataaaaaaagagatttcggaagtttcatcagcgatacttttgcttttttcaaattatacggtaagaattattttaaaaattttattctgctgaacggcttgctgcttattttaaccgttgttgtgatggtggtaggattcagagaattcttcggtgccattttcggatcgaatatgagcggacaaagctattattttgaacagtattttcaggataatttaggactgattatcatcgcgggaattgtgctttttgtgctttccacagctttaatgacggttaatctgctttttcctgtattttatatgaaaagaattgcggaagggcagaaagaaataaaaacagatgatatcatcagtgattttaaagtgaattctaaaaaagttttcattgcctatttcgggctcacctttttggtaatgccggttgcaacggctattttcggattctcttatctgttggtgttttttttcattgggatttttctgctgctttttatccttccgaatttattcagcatcattacctttctctgctacgattattttaacggaaataaaggttttttcgaaagcctaagttatgccgtaagatctcagttttcttatccgaacggaagagaaaaatctccctactggaaatattggggcgcaaccattattttgggactgcttttttatattgtaagcggatttttatccggagttccgatggttttatacattcttaaactttcaacaaccgctccggatgggaattttgaacagaatcctttctccggaaatttcggaattgttatattctttatctacggactttcaacattggtttcaaccattttaatgaatgttctgtatgtaaattcaggattgatgtattacgacagccgcaccgatcttcatcagaaaatggaactggcagaaatagaaacaataggaaataatgaataggcttcttcttttactgctttttttcagcttcggaactgttttttctcagcagcaggacgatctgcctcctgaagaagcagtttttatagactcgatagaaacgggacattacaggaatatgtaccgtgcagattctgtattgtataaaaatccggtaacggaaaacactgtttatcctaaaaaatttaaagacaacatcccttcaagatacaaagacaaagatttcgattatactacggtaaaacccagaatgtctttcgggcagaaactgatgaagaagttcgcagaattgttagacagtattttcggggaaaccgtatttacaaaatccggaaatttcgcagggattttagtgcgtctttttgtaattgttcttgtcggtttcctgctgtatttcatcattaaatatctcatcgggaacggcggaatttcgttcttcggaaagaaaaaccggaaagtggatatccgcgaagaagagcttcatgaaaatattcacgaaattaattttccggaaagtattctgaaatttgaaaaatcgggcgatttccgttcggcggtgcgttatcagtttttatttgtcttaaaaaaattaagcgataagaaactcatcgtctggaatccggaaaaaaccaataaagattatgcggcagagctgaaagcaccacacttaaaagaaagtttttacgatcttgcctatattttcgattatgtctggtacggagaattctctattgatgaagaaaactacctgaaatttaaaaaccaatatcaatcctttaaaccgtaattaattgttatcatgaacaaaactttcaaaatatatgctgtaatcttcgtcgtagtgatgattattctggcgttgtttgaagtcaacaaaacagaaagtacggattggaggaagaatttcaagacttatcagaaatcaccgttcggattgtatgtttttaataacgagatcaaagatctttttaagaataaagttaaaaaaatagatcagactccttacgattattatacccagaataaagaaaaaggaagtcataatatccttgtcatcgagcatgaagtagatacagaatcgtggaataaaattctggaagaagtttccaaaggttccaacgcaatgttgattatcagcgaaatgccgaaagaaatttccgacagcatcggttattatgattctatgatttcttttcgggacgaaaatgttttaaaacttaccgacacgaaataccagaacgatttcattaaactggataaatttccatccggaagaggttttactttcattaaaccgggatctgaagtcttaggaaagacagtggaaaaaaataatgacgatcaggcaaactttgttaaaataaaattcggggaaggttacttttacgttcattgcgaaccgctttttattaccaattactatcttctgaaacccggcaatgtaaaatatgcacaggacgttttttcttatctggatgataaagaaacattgtggtttttggaaagcaattcgaaatcttcccagtttctgctgaggtttatcctttcaaaccctgctttgaaatatgcttggtgggttcttctgggcggtctggctttgtttattttctttaatgccaaaagaaaacagcgtattgtcccgattgtggaaccgctgaaaaataactcggtagattttgtgaaaagtatcggaaatctttatcttcaggaaggcgatttccatgatatgatgtcgaaaaaagcccagtactttctgaacaaagtaagaatggatctccttattgatactcagaaattagatgaagaatttgcaaaaaaactccatctgaaaaccggaaaaccgatggaaatgattgatgaagccattgggctgattaaaaaaggacaagatccttacgcgcacgtaatgaaggaagatcttgtgagaatgaataaaattttggatgaaattatttaataaatgtaacaatctgaaaatataacagtgtggtaattctcaatgtaattggtaattggatacactgttctattgataaattataggatatggaaaactttgaaaacccaaatatagaaaacgaattttctatcagcttagataaaaaagaagatcagtttcagtcgagaatcgatatgattgaacttcgtacaagtcttgaaaaagtaaaagccgaaattgcaaaagtaatcgtcggtcaggaaaacatggtggaacatcttttggcggcacttctttcgaacggtcacgttcttattgaaggtgttccgggagttgccaaaaccatcacggcaaaattactggcaaaaaccatcgatgtaggattcagcagaattcagtttacacccgatttgatgccttccgatattttgggaacctctgttttcagcgtaaaaaattctgaatttgaatttaaaaaaggacctatcttttctaatttcatcctgattgacgagatcaaccgatctccggcaaaaactcaggcggctttgtttgaagtgatggaagaaaggcagattacgatggacggaacccgctatccgatggaagaacctttccttgtggtggcaacccaaaacccgatcgagcatgaaggaacttacagacttccggaagcccagcttgaccgttttctgtttaaaataaatgtgggttatccgaatctggagcaggaaattgccatcatcagaaaccagcacgaaagcaagcaggaagataaaacggaggttgttaacaaagtgattactgcacagcaactgaaaaattatcagcatctggtaaaagaaatcatcgttgaatctcagctgatggagtacatcgctaaaattatcatcaacaccagagaaaaccagttcctgtatttaggtgcttctccgagagcgagcctggctttgttaaccgcatcaaaagcatttgcggctttaagaggaagagattttgtaacgccggaagacattaaagaagcaagttatgccgttctgagacacagagtcatcgtatcgccggaaagagagatggaaggtcttaccgcagatgaaatcatcagacagattttagagggaatagagattccgagatagagtatgctatgaaatatttgttatcagaaaaagatatgtatgactgtatacgtgatgtagagtcaatattattgaattcggcaaaagaaaaattttcgagaaattcatataaaaaattaccaaataattcaggaatttatatgctattcgaagattcgaaaaatataatatatattggtgaaacaggaaatttaagagaaagatttaaagaaatacacagaactgttaatcatacttttagaagacaattaggcgcgattaaatttggagttataaagacaaggaagaaatttgatgaagacattgagcagaaattagatattttctttaatgaaaatttatatttttcttatgttgaggttaattttggaagattggaaatagagacatatttaatcgataaataccaagattgtatttacaattctaaaaaaaagaggaaaattattattacaacaatttaatgctaaaaagcctttacctcaatacacgctttttcttcacgttcatcggagtggggattctgtatgttttcgcttttttctttccgttactcatgtgggtcgcgcacatcgttttgcttctgatttttttggcagcaatggtggattatctttttgttttcaacaggaaagaagggatttctgcacagaggatattgcccgaaaaattatccaatggtgatgaaaatcccgtaaaggttgatattaaaaacaactatgctttcaaaattaatgtgaaagtaattgacgagattccgtttcagtttcagaagagagattttttaatcgaaaaacagattgaacctggaagaaatacattttttcaatatattctggagccaaaggaaagaggagaatataatttcggcagtttaaatgtgtatgtatcttcacctttaggttttgtcacaaaacggtttaattttcagaaagatgccaatttaccggcttatccttcatttattcatttgagaaaatatgaactgatggctttgcagagtgaatttctgttgggcggaatcaagaaaatccgtaaactgggacatacgatggagtttgagcagattaaagaatatgttccgggagatgacatcagaacgatcaactggaaagcgacgtccaaaacaaaccgattgatggttaatcagtttcaagacgaaaaatcacagcgtattttcatgctgattgataaaggacgaacgatgaagatgcctttcaaaggactgagtcttttggattattccattaatgcaacgatggctttatcccatatcattctgaaaaaaggcgaccgcgccggaatgatgactttttcgaaaaaaacagaaaataaaattgcggcagaaaataaatcgggacagcttagaaaaatttcggaagccctttacaacatcaaaacagatttctttgaaagtgattttaacagattatatcaggatgtaaaatattcgctgaaccagagaagtttgattttactttttacgaattttgaaacgttggatggcttaaaccgtcagttaaaataccttcgtggaatcgctaaaaaccatttattggttgtagttttcttcaaaaattcagaattgcagacgttgattcataaaaatcctgaaagtatgcaggaagtatacgacgaaatcatcgccgaaaaatttgagtttgaaaagaaactgatcattcaggaactccgcaaatacggaatttacacagtgtacactttaccggaaaatctgaacattgatgtcattaataaatatctggaaattaaagcgagagggattttgtaatttttaaacagggatttcatttcaaaatgaaccgcaaaattcataaatgatttaagcaaacttataaatgacgaaaattgcattgttcatcttatgtctctgttgttttttatcctgtgataaaaaggtggaacatgaggacgattttgtcatttttaaagtgaatcctaaaatagaaaatgttgctttttactggaaagatgataacggaacaattcttaaaagcattgctcatttaaagaataaagcagagcaggaaaataaagaattaatatttgccatgaacggcggaatgtttgaaccgaataactttcccaaaggattatatattgaaaattttaaaattctgaataaaacagatactttatccggtaaaggaaatttttatctccatcctaacggaatattttatctcacaaaaaataatggtgctgaaattgttgaaacaaaggcttttaggaacaatcctgaaataaaatatgcaacacaatccggaccgatattgctgattgatagggaaataaatccaatatttaaaaaagattcaaagaacctcaacatcagaaatggagtcggaatcctaaaaaatggaaatatcgtttttataatgtctaaaacagaggttaatttttataattttgcttccgtatttaaagaatcaggctgcgtaaaagctttgtacctcgatggctttgtttccagaacctattgtcctgaacagaaatggattcagatggatggagacttcggagtcatgatcgggattacgacatctaaaaaataaatttaaaaatgaaaatatcacttaaccgaatcaacgacgattttttatttgaatgcaccaattctcagggaaattcaatccttttggataatacaacacagcccggcgcaaaaggcgtttctcctatggaaagcgttttgatggcagtcgcgggatgcagcggaatagacgttgtttctattctgaaaaaacagagacaggaaatcacggattttaaagcagaagtagaaggcgaaaggattcctgtagatgatgcaaaacctttcaaatcgataaaagttaagtttcttctggaaggaaatattgatcctaaaaaagcgcagaaagcagcccagttgtctttcgataaatactgctcggtttccaaaacactggaaccgaatgtggaaataggatatgaggtttttgtaaatggcgaaagtgtaaaagattagattgagctaaattcaataaaaaaagagaggctgtcctaaaagtttgggcagcctctaaaatttattatttactccattacataagtaatcttggcttcaaaagcttggcaaccgtagctgtccatcccgtctggtgagaagctcctacgccgcggccgttgtctccgtgaaaatattcgaaaaaggtaatgtaatctttaaaattttcatcataattaaacttagcatttcctccgttgaaagcacgttctccattctcgtcttttaggaaaatagaacaaagtctgttgctgatatcgtgagcgacttcatccagatttttcttctctccgcttccggttggtagttctacttttagactgtttccataatagaaatggaatctctgtaaactttcaacaatcagaaaattaatagggaaccagatcggaccacgccagttgctgtttcctccgaacattcggctgtcactttctgcaggcgtataataaactacattttcagtgccgtgaacagaaaatttgaacggtttttcttcatataccttagacattgcccgaattccgtattggcttaaaaattctttctcatcaagcattctggtcaaaacttttgtcagacggttttttctcagaatactcatcagatgctttcttccatgtccttcttcttcccaatgtgaaacaagtttcgtgagttcaggtttatttttcagaatccaatccattctggtggtaaagttgggcattttatccaacagatgatgatcgataatttctacggcaaacataggaatcaatcctacaatacttctcagcttcagggaaacactgtcgccgttcccaagctgaagcacatcgtagaaaaagccgtcttcttcgttccagagtccttttgtgccttcacccagattttccatggcttcagcgatataaaggtaatgctcaaaaaatttaatcgccatatcttcatacacctgataatattgtgcgagttccatagcaattcgcatcatattcagagcgtacattgccatccagctcgttccgtccgcctgctccagatgctgtccgtcttttagcaccatattccggtcaaaagccccgatattatctagcccgagaaaacctcccccgaaaatattttttccgtttttatcttttcggtttacccaccaggtgaaattcagcagtaatttctgaaaaaccttttctaaaaataaaagatccggttttccgttttgcttttcatcaattttaaatactcggaagcacgaccacgcatgaacgggagggtttacatcgctcaggttccattcataggcaggaagctgtccgttcggatgcatataccattctttcgttaataaaagaagctgcccttttgcaaattccgcatcaataatcgcaaacggaacacagtggaaggcaagatcccaagttgcataccaaggatattcccatttatcaggcattgagatgatgtctttattgtgcatatgattccattccgtgtttcggacataatggttgaaatttctcggagcttcaaaattcggatcgcctttcagccattttccgacattatagtgataaaactgcttgttccagagaagccccgcaaaagcctgtctttgcacgtttttttcatcgtcatcagaaacatcattctgaatttcggcataaaattcatccgcttcagaaactctgctgctaaagatctcatcaaattcataaaacggattctcaagttcattgggagataatctgaaatcaaacattttcgattgtccggcttcaatcacttcatcaattaaaaaagaagcctttgttcctctcttttcaggattcacggtgttgcttccgtaagtaatataatcgttgatgccatccttgtaataagtatttcccggatagggtgttccatataatttcggactgttggtttcattatcacagaaaacactttccgcggcaatatttcttgaataaaacttttttatcggaacactgtcgtggttgatggtgatgcagccttcatgagaagcattgatttgtcctttatatgtattgtacccccatttccagttatttctgaaccacaccgtgggagccaatacaatcggagccactatattgcttctattgcagaccgttacccttactaaaatatcgttatattctgctttagcgtactctataaaaatatcaaaatattcatcctgatcaaaaattccggtgtcgaaaatttcatattccgcttcctttttacttctttttccattttcagaaagcagttcatcatacggaaacgcattaatcggatatttgtacaccattttcatatagctgtgagtaggtgtattatccagataataaaatagttctttaatgtcttctccgtgatttccctgtggattgctcagtccaaagaagcgctccttcaccatcttatcttttttgttccagaacgaaagcgcaaaacagaaaagctgctttgcatcagaaattcccgctatcccttcctctccccaacggtaggcatagctttctgcgttattgtgattggcgaaattccatgcatcgccgtttgggctgtagtcttcgcgtacatttccccattgccggttactcacgtaaggtccccagtttttccagtttgtgtcttgtaatctttgtttttcagcaatcatatctcatcattttcattacgaagttagtttttttgcgaaaaaattccaactcacgaaatttgaattattattaatatttccctgaaagccttctgtttatcggggtttgtaagattaaattaaatttttataaatatttaaaagaaaagttttatctttgcaccattcgttcattcaaatattgaaaatgttatcaagaaaggttgagggattagaccctatgaaaccttagcaaccctttgcgcaagcaatgaaggtgctacgttctaccagaattattttggacagataactcactgaagttctttcagccatttcctgtggcattttcaattgtattaaaataatagaattgaaaacagaacttaaacatattaatttttcgtatcgtaccgattcccaaaaggaatacaatatcccgttgagctatcagcttttcgggaaagacctgttttctgccccgatcattttagtgaatcatgctttaaccggaaattccaatgtttccggagaaaaaggatggtggaaacaactgattggagaacatcaggtaatcgataccgaacagtatacagttttgtgcttcaatattcccggaaacggatttgatgatttttttattgatgaatgtgaagatttcacgccttcagatatcgcaaacatatttttgaaaggtcttgaaattttaaatatcaaaagtttacacgccattattggaggttctttgggaggcggaatcggttgggaaatgctggtaaaaaagccacatcttaccggaattttcatcccggtagcctgcgattttaaaacccacgactggcttcatgcacagtgtctcgttcagaaatttttactaaaccaaaacgatgaacctttacagaaagccagaattcatgcgatgttgtgttacaggactcctgaatcgttaaataacagatttcaaaacagatacagtgaagaaaagcagagattagagtcggaagactggcttgtttatcacggaaaagctttaaacgaaagatttagtttaaaatcatacaagctcatgaatcatttgctgatgaacatcaatgccaatgaagaacatttggaaaaaattcaggcgcgaatgcacatgatctctgtagatacagacttatttttccccgcttcagaaatccgaaagtgctttaaaaaactgaaagagaaaaacaaagatgttttctatcacgagatcacctcagttcatgggcacgatgccttcttaatggaatataaacaattaaatacgatcattaaaaatattttgaaaaatgagtaagattaatgctaaagaaataaaatttttaaaaaacagatccatcatcaaatttgaaggagaagatttcttaggtgaaatcgggatcgacggacgaatttttaaagcgcttactttggcgcgaatcagtgtgggagtaatttcccagcaggcaattgaaaacggaatctccattttagttcatgaaaacgattccgaaaaagcagtcaattgtctgattgacgaatttgaaccagaaagaaaatcggggaaagtttcccagatatacagcatcaataatgtgtcggtgttaggatttgttgcagaagacttcaacaaagttttagcggaactcgcaagaaataatgttttcccgttgcttttaaaccagattgcagccgaaaaacgggtaaatatcgttgtgacatcttcacaggacgaaaaagcaaaaaatatcatcgaatctgaaatttccaaaaaaccgaaaaccgttcatctggcaatcatcggtcacggaaacgtagggaaaaccttaatacagcaggttttggaatcttcagaagaaattaaaagacgaaaaaaaattgacctgaaagtagttgcagttgccaattccagaaaaatagcattcaacaaaaaaggattcgacagcaattggaatgatgaggttttaacagcagaaaaaccttccgatgttcaggaactcattaagttttccaaagaaaatcagcttgaaaatttaatcgttgtggataacaccgcaagcaaagacttcgtaaaaaattaccacactttggcggaaaacggcttcgatctcgtttcctccaacaaaatttttaacacccttcccatttcagaataccgtcaactaagatatacgttgaacaaaaacaacagacgctatctctacgaaaccaatgtgggggccggtttaccactgattgataccattaaacttctacacctttcaggagaaaatattaccagaattaaaggcgttttctcgggaacattaagctatgttttcaataatttttctttaagagaggataagttttccaccatcatcaatgaagcgttggaaaaaggatatacagaacccgatccaagagaagacctgtcaggaaacgatgtgggaagaaaattattgattctcgcgagagaattagacttaatcaacgaatttgaagatattaaaattcagaatcttgttcctgaaaatctgctttctgtttccaaatcagaatttctttcaagactggacgaattagatgctgaatatcagaaaatcaaagaaaatcaggaagaaggacacgttttaagatatgtgggagatcttcacggagatttgcagaaagaaaaaggagaactcgatgtgaaattaatttccgttccggcaacttccgcgttaggacaactgaaaggctcagattcaatcttcgaaatctacaccgaaagttatggagaaaacccaatcgtcatcatgggagccggagccggcgcaatagttacggcaagaggcgtattcggagacattttaagagtaagtgaaacgaaataaaagaacctgtgaacccgaagggttcaatattaatagccataggtagaacctatggaaaaaataaaaaagcatttaaacccgaaagggtttaacatcagtagccgtaggtgaaacctatggaacgaaataataatattaataaaacaatttaataatgtagcagttaccaatattcattacaattgtcatgctgagcttgtcgaagcatctcattggtatattgctaaaccgatacgatacattgttacattttaaactatatggaaaacaaaaattttgaaacctttgccataagaacccagactgaaagaacccagtttgatgagcattccacgcctttatatctcacatccagctttatttttcaggatgcggaagacatgagagcgagctttgcggaagaaaaaccaaaaaatttatacagccgtttttcaaatccgaatgtaacagaatttaccgataaaattgccaaaatggaaggagcagaagctgggtatgcttttgccacaggaatggcagcgatttactccacatttgcgactttgttaaatgccggagatcatattgtaagctgtcagtccgttttcggttctacgcatactttgttcacaaaatatttcccgaaatggaatatcgaaacaacctattttaaagcagaagacgccgagaatgtagaaaaatatattcagcccaacacgaaaattctgtatctggaaacacctaccaatcctgcaattgaggttttggatttagagtttttcggacagattgcgaagaagtacaacttaatttttattgtggataactgctttgcaacaccttacctgcaacagccgataaaatacggagcagacatagtggtgcattctgcaaccaaactaattgacgggcaaggtcgtgttttaggcggagtagcggttggaagagaagacctgatccgtgaaatctatcttttcgcgagaaatacaggaccagcaatgtcgcctttcaacgcttgggttttgtctaaaagtctcgaaacattggcgattcgtgtagaaaaacattgcgagaacgctttaaaagtagccgagtttcttgaaagccatcccaatgtagaattagtaaaatatccgttcttaaaatctcatccaagctacgaaattgcaaaaagacagatgaagctaggtggaaacattgttgccttcgaaatcaaaggcggaatcgatgggggtagaaactttttagataaaataaaaatgtgttccctttccgcaaacttaggcgatacgagaaccattgtaacgcatcctgcttctacaacgcactccaaattatccgatgaagaaagaaacgaagtcggaattactgcaggtctggttcgttgttcagtaggtctggaaaatttggaagatatcattgcagatttaagacaggcattggattaatttgatttgggcagctttatccgccttccgctcccgattttttgcctccgcttcgctgcggcaaaaagagctccgctaaagtcgggctgcgaaagattcagcattataaaacccgaaggtttcaacaataataaccgtaggtgcaacctatggaaaaaaatataataaatgaaaaattcagaacaattatacaaagtattatccgaaagaattttaattctcgacggagcgatgggaaccatgcttcagcggtataaattcgaagaagaagattaccgtggcgaacgtttcaaaaactgggaacatccggtaaaaggaaacaatgatttgttgtctttaacgcagcctcatgccattgaagaagttcacaaaaaataccttgaagcgggagcagacatcatcgaaaccaatacattttcaggaacaaccattgccatggcagattattacatggaagatctcgtttacgaactgaattacgaatctgcaaaaattgcaagaaaagcctgcgacgagtacactgcaaaaaatccggataaaccaagatttgtggcaggttccataggtccaaccaacagaaccgcaagtttaagccccgatgtaaacgatcccggctacagagccattacttttgatgaattgagaatcgcttacaaacaacaatgcgaagcattattagacggaggatcagatattcttttggtagaaaccattttcgatacattgaatgcaaaagcggcacttttcgccattgacgaacttcaggacgaaagaaatatcaaaattccaatcatggtttcaggtaccattaccgatgcttcaggaagaacattgagtggacagaccgcagaagcgtttctgatctcagtttcccatttaaaccttttaagtgtaggttttaactgcgctttgggagcaaaccaattgacgccttatctggagactttagcccacaattcagaatttgctgtttcagcttatccgaatgcaggtctacccaatgctttcggaaagtatgatgagacaccggaagatatggcgagtcagatcaaagaatatgtagaaaaaggattaatcaacatcatcggaggctgctgcggaacaacgccggatcatatcaaagcaattgcagatctggtttcgcaatatccaccaagaaaattgaaagaattggtctgaaataatagaattttttaattaaatcataagaaaaaggaacagtttttaatattatctttaattatcacacaaaattaaatataatggaaaaacctatttactttaaagatccggaggatgccagattatttaatgaactcagaaaaaaagtgaaccaaagagtagaatctattcctgaaaacagggacatttacattcagatcaaagcagttattctgcctttggtctatttcggtttatatgtctttgcacttttacatgcaaatcagtcttctgtgtacattttgagttttattttaatggggctttctctggttttaatttatctgaatttaattcacgaagcgtctcacaataatatttttaaaagtaaaagactgaacagtctggttttgcagattttcgattttgtgggagccaattcctacatctggaagaaaagacacatcgcaagccatcacgcctatccaaatgtagatggttgggacacagatatcgagcagagcggattgctgttaatcgttccgtggatcaaagcaaaaggaattcagaaatttcagcattgttttttctttctggtctatcctttatatctgttcaactggatgtttatccgcgatttcagagattttttcgataatgaaagagtgatcctgaaaacgcagggagcgattccagtaaaggaaaaaattaaaatggtggcgtataaactgttttactttttctatcagattgccgttcccgttctgttttttaaagtctctttaggcttggctttgggagcatggtttttacaggtaattgcagcgagtatttttgcgctttttgtattgttgccactgcatccgcttcccgataatgccttcccgaaacttgatgagaaaaacggacttccttttagctggcttcatcatcagtttgaagtcaccaacgatttaaaagaaaataactggtttgtgcggaatattttggggaatttcaactttcacgttgcccaccatctttttccgaattacagttatgtctattataatgaaattacagaagaaatcgaacagtttgccagagaacataatctcggctataaacggtttccgatttttaccgctttgggcaaacatatcgatttgctgaagcaaaatgcgaataatgcatattttattttagaagaataaattgatgaaatatttaagattatcggggcttgagcctttgattattacaccggaaagcaactttatcaacgttggggaaagaaccaatgttgccggttcaaagaaatttttaagattaataaaagaagaaaaattcggggaagcgctcgatattgcacgtcatcaggttgaaggtggtgcacagattctcgacgttaattttgacgatggactgatcgacggaaaggcttccatgattaaatttttaaacctgattgcctcagaaccggacatcgcaagaattcctctcatgatcgactcttcaaaatgggaaattctggaagccggattgcaggttgcacagggaaaatgtgtggtcaattccatcagcttaaaaggaggtgaagaagaattcatcaaacaggcaaaagccatcaaaagatacggagccgctgtgatcgtcatggcttttgatgaggtgggacaagccgatacttacgaacgcagaatcgaaatttcaaaacgttcctatgatatcttagtgaatcgtttaaatttccctgccgaagatattattttcgatttaaatattttccctgtggcaacaggaatggatgaacatcgcagaaatgccatcgattttattgaagcaacaagatgggttcgccagaatcttccgtatgcatccgtgagcgggggagtttccaatgtctcgttctcgttccgtggaaatgatacggtgagagaagcgatgcactcggttttcctgtatcacgcgattcaggcaggaatgaacatgggaatcgtaaatccggcaatgctggaagtatatgatgaaatcaataaagaacttctggagcttgttgaagacgtgattcttgataaaagagaagatgcaacagaaagacttttagattattccgaaaagcataaatccgttaagaaagaaaaggttgaagatttagaatggagaaatcatcctttgcaggaaagaattacccatgctttggtaaaaggaatcgaccgttttatcgaggaagatgtggaggaagcaagattacaggcagaaaaaccgcttcatgtgattgaaattaatttaatgaccggaatgggtgttgtcggagatctgttcggaagcggaaaaatgttcttgccacaggtggtaaaatctgcaagggtcatgaaaaaagcggtggcttatttacagccgttcatcgaagcagaaaaagacggaacaaaaccagccaacggaaaaattttgatggcaacagtaaaaggagatgttcatgatattggtaaaaacattgtgagtgtagttttaggatgcaacaattatgaaattgtggatcttggcgtaatggttccggctgaaaaaataattcagaccgcgattgaagaaaaagtagatttgatcggattaagcggactgattacaccaagtctggatgaaatggtgtacatcgctcaggaactggaaagacagaatttaaatttccctttactaattggtggcgcaacgacttcaaaagcgcacacagccgtaaaaattgatttaaaatataaaaatgctgtagttcacgtaaatgatgcttccagagcggtaaatgtggtaagttcattattgggcgatagaaataaagaatatgttgatgatctgaaaagcgaatattccgaattccgtgaaaagttcctgaacagacaggtagaaaaagactacgtttctattgaagaggccagacagaataagtttaaaatcgactgggaaaacgaagaaatttttacacccaatcagttaggaattaccgttgttgaaaatcaggatcttagagaattattgcctttcatcgactggtcgccgtttttcagaagctgggatcttcatggcaaatatccgcaaattttagaagatgaggttgtaggagctcaggcaaaagagctattcaaagatgcacaggtgattttaaaaagaattttggatgaaaagatattaacggcaaaagctattttcggaattttcaaagccaaatccaacgatacggatgatattttaatttttgatgaaaacaacgatcagaaaacgaagttcattactttgagacagcaggctcaacgttcaaaaggaaaagattatctggcgttaagcgattttattgcccctgaaagttcaggaaaaacagattatatgggagctttctgtgtaacaaccggtttcggaacggatgaattggcgcaggaatatgaaaaagcaaatgacgactacaacgcgatcatggtaaaagctttggccgaccgtttcgcagaagcttacgctgaatttttacataaaaaagtaagaacggaatattgggggtacgccaatcaggaaaatttaaccaatgaagaattgattgctgaaaagtataaaggaattcgtcccgctccgggttatcctgcgtgtccggatcacttagaaaaacacgcaatctgggatttactgaaagtggaagaaaatatcggtgtttatctgacggaaagtttagcaatgttcccgactgcatcagtttccggatactatttcggaagtccacacgccaaatatttcggattggggaaaatcgcagaagatcagctgaaagattattcggaaagaaaagggatttctttgcaggaagcgagaaaatggttgaatcctaatttggcagacggaatttagtttcagtttcggcggcggcaaagccgctagtcatggtcggaagatttttttattattttgaacaatgtttttttttaatttaactatatgattttcaattaattgaattgttgttttggtttttatttcatatatttataactgataattaannnnnnnnnnnnnnnnnnnnnnnnnnnnnnnnnnnnnnnnnnnnnnnnnnnnnnnnnnnnnnnnnnnnnnnnnnnnnnnnnnnnnnnnnnnnnnnnnnnnctatcaatagattttcgtcaaaaagcatatctttgtttttcatgaggtgttttagtatttgttcaattctaaaatattaattttagacattaagcacctcatgtttttctccgaattcacgttattataaagtgagcaaagaggaatcaacaagttgatttgatgaagccaatttaaagagcttgatagttatttggtaaaatataaacctcataggtttttaaaaacctatgaggtttgaatgagttctaatagatttacaacaacaagaaagagccagaataatagctgtaaaagttaaaaatatgcgctcaaatccagtttcaaaatatcccctactcttttgaaatcttcatcaatagtcgcatttaccgtaattttttcgttggaaaccggatgattaaatgtcagttgatgcgcatgaagtgtcattttgttgatatcaaatgtctgaagccacaatttattctgtttgttacagccatgttttcgacagcctaaaatggggtgtaaaatgtgtttaaaatgttttctcaactgatgaaatcgtcctgtttcggggatagcttctaccagacaatatcgtgaagtctgatgttttaaaaagggcaaatcgatctctgaagtctgcagacggcgatagtatgttattgcattttgcgtaatttcgttttcgttaaccaaatcataatcaattgtttcctcttcctttgtccagcctcgaagaatggcaatatatttcttttcaacccgtttttcctcaaactgggtactcatgattctcagcgtttctttatctaaagtaaacagcaaaacgcccgaagttttgcggtctaaacgatgaacaggatacactttttgtccgatctgctttctcagttcctgaatcgcatacgtatcggcttctcccgaataaaaagatttatggaccaacaatccgctgggtttgttgatggcaataagatgttcgtcgcgataaagaatttctaacatccggcaaaagtagaagttttatattattcttcaaacttaagatatgtattaaaaaatggcagcatctgattttcaattcttccgttttctttgcttacctcgcttccgtgcgttccgatatattcttcagcttcatgttttataccgagcatttccagcgttttgctgaaattcaggcagctcggcggaatgtgtttcagttcatcgtttcttccccagtcgaattttatggcttttaattttttaagattttcatattgtgaaaaaggcaattctgatgtggaatttctgttcatttcgtctaaaacggctgaatttatttttaaattttctccttcaaaagaaaatggaagatctgcaaaaaagggatttttatttttattcccgctgtaagctcttgcgatggcaaagacaatatttaaccttgcattttcaggtttggatacatcctgaatgtttttaatttgatcagcatttttatagagttccatttctgaaagtgcaaagaaacgggcgtctaaaattccgggtgacagtgcataaaccgatgaaaaaacttcgggatgaagtatggcatttctcagcgctccgtttccacccatagaatgtcctgaaattccacggctgtttttatcaagaatcgttctgtaatttttatcaataaaatcgaccagctcaacggaagtgaaatctgaccagtttcctgaagattttgaattggcgtaaaaacttcctttaaaaacggtgctttcatcgggcatgacaacgataacgggttttatcttttttgaataaatcgcccgatcaaaaatatgattgattttatcgttgctcaccaacaaactgtcgctccagaaaaaaccatgtaaaaaataaataacgggatatcttttggaggatttttcataatccggcggaagataaacggttattcttcgcttaggattttctccagcgctattctgtaatgttttagcggtaatatagattgtaacgatctttccctctgaaattttctgcgcaaaaaacaaatggcttaccaaaagaaaaacaacaattaataatcctgattttttcatgattcaattttgataaagcaaattacgataaattgtctcaaattaagacaataacaattaaaatgatttcatacctctgatattgaaaaaaattaacattttaaattcttttgataaaagagagaatctttattttcgcgcaaatttttaactatgaaaaagctattatttactttactgctgagtatttttccattaatttctttcgcccagaactcagattcactgaggttgggaaagtctaacagagagtttttcatcaaaggggatcagaaattcaaattttccgagtataaaaaggtatttaccaatcctgaagcgctgaactatatgaagaaagcaaacaccaacagtacggtttctcagattttcggagcgattggcggtggttttatcggtttcggattagcaaaacagatattacgcacaaaaacagcttatcacaatggcgtagcttacgaagtaaaagataaaagcggttggggattggtaggaatcggagcaggatttgtgggaatcgggattcctttcgcgatcagttccggaaaaaatctgaagaaagctgttgatacgcaaaaccagaatccggaaggaggagaggcaaaaaccgcttcttacaggttagacatcacaggaaacagcatcggattatcctacaatttctaaaatatacaagagcagtttttacaactgctttttttatgctgttcttagtagtcctgattgaacggcatgtctgagctctttttctggtttcagcgcggcggctccgccgcgctgaaaccagaaaaaagcgagtagtgaaagcaggttcccgactcctgaaatttaaaaatgtaaatatttgctgtctattgacggctttttttattgaatttcatggaattgggattcaaattcatatttttgcactttcagacgttaaaaaattatggcaaagcaagaagatgttttcaagaaagtgatttctcacgctaaagaatatggttttattttcccttcgagtgagatctacgatggtttatccgcagtttatgattatggacaaaacggagccgagttaaaaaataatatcaagcaatattggtggaaagcgatggtacagcttaacgaaaatattgtgggtattgattcggcgatccttatgcacccaacaacatggaaggcttcggggcacgtagacgctttcaacgatccattgattgataataaggattctaagaaacgtttcagagcagacgttttggtggaagattactgtgctaaaattgaagataaggagaataaggagattgaaaaagcagcgaaaagattcggtgacgcttttgataaagatcagtttgtggcaacaaatccaaaagttttggaatacagagccaaaagggaagcaattctttccagactggcaaaatctttagaaaatgaagatcttgctgatgtaaaagcgttaattgaagagctggaaattgctgatcctgataccggttctaaaaactggacagaagtaagacagttcaacctgatgttcgggactaaattaggggcttccgcagattctgcaatggatctttatttaagaccggaaactgcgcagggaattttcgttaatttcctgaatgtacagaaaacctcccgtcataaactgcctttcggtattgcacagatcggaaaagcgttcagaaacgagatcgttgcaagacagtttatcttcagaatgcgtgaattcgaacagatggaaatgcagtttttcgttgctccgggaacagaattggaattctacgagcaatggaagcaaaagcgtctgaactggcatttggctttaggtttgggtgacgaaaattacagatttcatgatcatgaaaaactggctcactatgcgaatgctgccgcggatattgaatttaattttccgtttggatttaaagaactggaaggtattcactcaagaacggatttcgatttaaaagcgcatgaagaattttcaggaagaaaacttcagttcttcgatccggaaagaaacgaaaactatgttccgtatgtggtggaaacttcggttggtttagaccgattgttcttagctttattctctcattgtttaagagacgaagttttggaagatggttccgaaagaacagttttatctttacctccggctttagcacccattaaagcagctattcttccgttaatgaagaaggacggattggcagaatatgcagaacagattttcaacgatctgaaatatgatttcaacttattctacgaagaaaaagatgcgatcggaaaacgttacagaagacaggatgcgattggtactccttactgtatcacgatcgatcacgattctttaacggatcatacggtgacgataagagacagagacacgatggagcaggaaagagttccggtttctgagttaagaagaattatcgacgaaaagacaagtttcagaaatttactttctaaaatatagaccgaaagccttgagaaatcagggcttttatttttttaagaacatatccccgaatttgctatttttgaaattcaaattttaaccatgaaaaaattaacccttttggtttttggtcttattcagacaattgcatattctcagactcaggatctggcttctttagcatcgggaaaaaatgtaggaatgaatgcgctgtttgataccaaagacaatctttacggctatgtttctatctatgcctacggaaaaacagacaataaaaaacagaaattcgaatacgttattttagataaaaacctgaatccggtggcgaataaggaatttgaagcaggacttctggtttccaattatttcggatatgtggattttaaagggcagattattcttcagccttcggacatcaattatcttcaggctttttccaaagatgcagcggctccggtttctatggtcatagatcctaaaaccaatacagtaaagcctaaagtgtattacgattatcaggaagacggaacgtttaaagaaatctcacagcccaaaacttttaaagaagaaagaaaagaaaaccgcgccgagaagaaagagaaaggctacaattatgtttctgcggtaggagaaattaaggaaggcggttatctggctttagaatacaacgactacggaaaatacatcaataaaaacagcctgataaaatttgatgataataagaaagaaatctggcgatacagctacaatacaaatggggataaaaaagtattttcggatcttaccattttggaaaaagacgaaaaccacatctacggaatcctgagaaaggtgaatgatgacgacaaaactttttctcttctggtgattgatatgaaaaccggaaaagagctttccaacaaaccgataacgggactttcgccggaaacactttacaacatcgatgctttaagcggaattgataatgataaaacttttgatgataaagtagttttgctgggaagaaactatatttccaaagagaacagaggctttgcaagatttatccttgataaaaacaattataatgtagatctgaaaaccatcagctacaaaccggatctttccaaccacattccaaagctgagcgcagacggaggcgtagaaaacggctattatcttcagacaaaggatgcgtattttatgagcgatggcagtgtgggaattctttcggagaaattcaaacctgcgggacagtacaatgctccgaaaacaaccgatctggtttacattaacaccgataaagattttaaggtaaaagatgtacaggtttttgaaaaagaaaaatcgaagtgggtaaacagcgattatcttttttctcaatatctgaatgacggaaaagacgttgtctttttcttccgcgattatcagaaagatcaggtgaccaaagaaaagaagtggaatcttttcatcaatacgattattgacggaaaattcaagcaggaagtcgttcctatttcagaaaaagataattatgtggtaacgccgtatgttgcgaaagaaggctacattctgcttcgcgaattcaatgaaaaagaaaaattcaataaaatccgtctggaaagactgaattattaagcgttgatttaaattttatactcaataagaatcctgactgaaggtcaggattctgtcgtttgataataatctgcaatatttttaatttcatcgagactcaggttccacataaaattcaggaactgctgataactttcactttgatttttgggatctacccgatctaaatatcgatttaaattgtagttttttctcgcttcataaatcttggcgaaacattttccgagccagtttttgtaatacttttcctcttcgttatcctgcaaaaactgaagacttgcataaattccgactccataatcttccgaatgataaaaattaggcaaagtttccattcttgcgattttttctaccgcagaataagaatcggaaggtttttcatccggaacatcatttttaagttcaggaaacacttttttgaggttattgattcttaaaaccatttcaggatgcgatctcagagaatctttattcagcttttctttgaaatggttgtaattatacagagaaaaatcttcttttttcagccatttgtctttgaactcctgtttgggaaggttaaagtattttttgtaagtttccactttcagttctcttggcgaaatggtatcaaaatcttccagtcttttcagagcatttacatattcagctcttttaaaatcgctgtttttaaaaaccacatatcctaaagaatccgcctgcatttcctgctttctgttttcagccccttttctgtagattctgtttttcatcacatcaaaagccctctgattacggttttcctttgtcgatttaatatcctgaaccaccattttgtccattttatcctgttcgatcatgctcagaaaagttttcagcgtatgctcggaaattttatgtcctaattcatgggaaattacagcagcaagctgatcgtcattattcagccagttgaaaagccccatattgatgacaaaagtgccgtctgcaaaacagtatgcattcggagtgttgtctttggcgataagaatttttaaattttgcggaatctgggaattgttttttcttaaccgttcgataagatttttaacctttgcatcaaacatagaattgaaaacaaaatctttttcctttacttttttttcaaattctttgtcgaattctttataaattttagaaagctcattgcccgtttttccgggataatcgaatctgctttttttacttaaactttcggtattcgccgtgaaatttctcagaaattcttttctctgggcataatctgccgtatcgagaggtttatacatctgtccgaaagcggtgataacgaaatggataagcaataaggaaattagttttttcatcatcttttacatcaataatcacaaaaataaatcatttcgtttcatgttttcaaatttattttaaatttgtttaagatcaattgctatgacaattcttatttattttgtgacatttattgtcattgccgtacttctcttttatgttttgggatatggttatattttcaacggaatatccaaaacctatttaaggggaaaactcagcgccaatattgatgacggaacattgttttccggcaacctcatcgctacagaatctcctgaactttgggaggaatctcccgaatacaacaaaaaacaattaccgaaaaatatcgttgaagatttaacacaatccaataccgcatcttttattgtggtgaaaaacggaaagctgcttcacgaagagtattggaacggctacaatcagctatcaaaaaccaattctttctctatggcaaaagcagttacggtaatgcttttgggcaaagcattggaagagggaaaaattaaaagtcttgatgataagttttcggattattttgaggaatttaaaaataaagattttgctaaaaatttaacgttaaaaaatctggctcagatggaatcgggactggactgggatgaaaattacaagaatccttttctgcccaatgcgaaagcttattacgggaaaaatttaatgaacgccactttttcaaggaaatttaaagaaaatccgggagaaagatttgaatatcagagcggttctacgcagcttttagggtttgccattaaaaaagctgtcggacagtctttggcaagttatttatccgaaaaattctggattccgatgggaatggagcaaaatgcaacatggagcacggacgaaagcggaatggaaaaaacatactgctgcattcattccaattccagagattttgcaaaactggggcagttatttcttaatgatggaaaagttgaggataagcaaattttaaatccggacttcatcaatacaatgcgtactccgactaaaaattctgaggaaatttacggaatgggattctggatcaatcatgaccatcctataaagcattattattttttgggacttcagggacaatacatcattatgattccggaacatgatatggtgattgtaaggacaggaagctataataatcttccgaaaaacgacagaggaagaccggatcaggtgaaatttctggtgaatgaaacggtaaaattatttcaataaaaatatggaaaaatacagcccgaaagttgatgaatacattgaaaaatcgcaggattttgcaaaacctattctgaattatatccgagaaaccgttcacgaattctgtcctgatgcagaagaagcgataaagtggaagtttcccacattcctgtataaagggaagattctttgttcaatggttgcttttaaacagtattgcagcatgggattctggcttcatgatgagatgacatctctgaaagagtttgaaacagataccgaaaaaacgaatatgttcagcctgggtaaaattacagaaacagaaaatcttccttcaaaacctcagcttaaaaagatgattactgaagcgatggaactgacagatatgggcgttactttgaaaaaagcagctccatcgaaaacagaaacagaggttcctgattattttcaaaatgctttgaatgaaaatgaaaaagctctggaaatttttaaaaaagcttcaccctctttccgtaaagaatatatcaactggatcaaggaagctaaaacggaatcaaccagaaacaaaagaatggatcaggctttagagtggatctctgaaggaaaaggcagaaactggaagtatgaaaaaaggtagttttacatctaatgaaatctgaaattcgcctctttaagcgtattattttttagaaaagcttcatattcgggagacatctgttttcgtccgaaagtattttcgccgctcatgcttccgagacgtactttatctttgccgtattttctgttcatggcatccattgctttcatcaccggcaaatgcagattctgggtatcttcttcaaaaagattaatcaatctttgatcttccggcacaaaatcgttcacaataacgcctgcttttttataatgaaatccttctttgaaaatatcttcgaacagctcatttacaactctgccaattaaaattgatgaatttgtgggattaggaagaattcgggttgcggcattccgatattcgggaagatccttcctgaatcggttggtctgtacaaaaaccgttaccattttgcagcaggtattctgttttctcaggcgttcggaacagtacattccgaaggtttccacacgttcgcgaacatcttcttttttggtaagcatttccatgaaacttctggtgacggcaatggattttttgggagacggagcatccagttctagctgacggattcctttcagttcgttcaccattcttactccgtgaattcccatgatcttccgaacccacatttcaggcttttgaagaagatcccatgctttatgcactccattatcatgcatttttacagcaagacgtcttccaattccccaaacgtcgccaatttttaaccattttaaggctttttctattttttcaggggtatctaaaatataaattccgttaaacttttctggaaattgctttacaatgcggttcgccaccttacaaagtgtttttgtagcggcaactcctatacttacaggaattttttcctgctcatcaatttcatttttgattttgagacagtagtcgtaaatatcgatatatttgaagcttttcagatccagaaaaagctcatcaattgaatacacctcataatcagacttatccacatacgctgtggatatctctataacacgctggcttttaaaattatacaattcgaattttgcggaaaaacattgtacatcatgttctttaaataattccttgtacttaaaagccggagccgccatcggaattcccagatctttagcttccttacttctggacactacacagccatcgttgttggaaagtaccacaacgggtttattttctagtttcggatcaagcgttctttcgcaggaaacaaagaaattattgcaatctaccaaagcatacataatagtggatactggaaaacaaaattagatactatttgtatcatttttagtatatttacagatacaatttgtatcaatgtcaattttttcagataacattaggtttttaaggactcagaaaaatttatcgcagcaggaacttgcggacaaaacatcaatgagccgcgtccggtattccaaatacgaggatgggcgttctgaaccgccttatgaactgctaatcagaatttcgaagtatttcaatatcagtattgatttactgcttactgtggatatccggaagtatcctctcgaagatgtattaaagcttccggataacagaattgttcttccggttgtcgttgataaattaggcaacaacagcattgaaattgttcctcaaaaagcatcaatgggttatttatccggttacagtgatccggaatatattgagagtttacaaaggatttccttaccttttttaattaacggaaagtacagggcatttcccgcaaaaggagattcaatgcctccttttaaagacggttcttatatcatcggaaaatatgttgaaaatattgaagatctaaaaccgaataaaagttatgtttttgtgacttggaatgacggtatttcttacaaaagatttaaaaccaaaaagaaaaaagcaataacagtagcctcagacaattcattttataaaccttatgatattcctttgggggaaattgttgaaatctggcaatatgcatctggaatttttccggaagattttgaacctgatcattttgataactataatttaaaagagatgtttctggagttaagaagagatattaaagaagtgaatgataaactcatttaataacattccaacacaccagtttttgatgtattagaaatgttatttatctatgagaacaaactcatgacgaaatttttcaattatatttttcttatgcttgatattttaacacctaaagtggcatttggagtatactgaaaagatgtagcaaaaaccttaaatcttacaggtgtagccagattattatcaatcatatttgtcgcaaccccgaagctaccatcgtctttataaatagatgttgttacaaaatttccttttttagaaataataaatttcatattatcattgattcccacatttactccgccgtatccccctgtcgtaaaataagcataatgagcagagttattacctacagtaaccgcaccagaatttttttcagatgtaagagtatcgttaagagatgttgtaattccgaatcctattgcaccaccaaaaggattgtagtttgttcctacttttgtgatcgttccttcaattacaaaatcgtcggctgcagaaagaaaggactgcgtgtaatatgctaagagaacaatattatcattttgtcctgcagcattaaataaatcggcatcatatcctatattcagttcatttggggtttttaccaattcgttatcaaacggaagatttcctattgtaactctggtccattcatttctgctgatatcgacttcatttgctgaatttttatcaaatacggtaaattttgcaggtgtattatagtctgcaactccattccacaatcttattgtgtaatctcccaaagaataagtctgagtattaaacgaaaaactaatcatatttgcattgagcagagtaactttagaattatcaatagtttctactacacttcctgatgaatttataattttaatactgaaattgctcggatttaaattaagattagagccaattaaagtgataaatgtcaaattattagaattggttgcttttggaacaactgaaggataaaccagtcccacattcatcgcattggtcgtccatcctccattcatagatgtcttccatgccgttttttcagcttcagacattattgtcggaatattcagaaaaggttttactccatttgaccgaccgattattcctgctggattttgagataaaaatgcagtgaatgttgcatcattggtaacatcatttaatcctgtaatcgaatattttagtcctgaagtatttactgtccagtctgctcctaatgttaaaccggctccggctccggaagttaaagaagagttcgcaatatttttccccaaatctccagctgctttaggtgttccgtctgcaagaagtacgtaattagaattataatatcctgcatccactttcttgtaatattgagcatcactttgctcctttgtgtaggaagttcctgaaatggactctccatcctgctgtctaatatcattagtagcaatattttgaggaatgtcatttactcctaaagttctcttccaagattcaatgttgtcagcagaaaagtttgaagcatctttatttgctttaacagataaagcattttctaatccattaacagtatgtatagataatgtttcatttttgtgataataactgtctatccattcccaaaactgttcttgacttggcttcaaaccttccgaaaaccagttttttaattgatttttgtctgtactcataataataatttgtttttgtgtgtattttaattaagatcttcctgaatctgtatcgttaattttggatgatttttaatgtattcggcaatcttcagccagttgctctgtttgggttcgtagtattccaaaacattattttgaacgtatctcattttgggaggataccattcattcttttttacaaacttcagcaattctgttgcttttttagttacgggattttctccttgtttataagaatgtaaagacactctatcgtaccagcttaagacattataaatactgtctaaagcaagtgctgaattttcatagctgattatattttccatattttttgattttgcatatgatgtttaaaagttttttaaaaagtaaatcagaatttttaagttttctaatgattaaatttcattcctaaaaactgtacttttcatatcacaaaaatggatatgcaaaacgccaaaactcgacgtattaaaaattaattttctaatacaaagagcagacgtttaaattttaaagctaaaaatcaataaccttctggctaacaataatattctaattcatctcaaaacaatatttatttatcattaaaattcataaaaaacacgtcaccttttggcgtttcctatgtatagctttgtatttcaaaatcataaaattttaaataatggataaagtaagtttacagagaattgaaaaacttcatccctatgtaagggaagaggtaaaacagattgtgaaggaatgcaatgaagcattaaccggaaaagcaaaaataagaattacacagggcttaagaagttttgaagaacaggaaaaactttacgccatcggaagaattacttcaggaaaaaaagtaaccaatgcaaaagcgggacaaagcatccataattacggattggctgttgatatctgcttaatgatcgatggaaaaaccgcaagctgggacaccgcaaaagactgggataacgatcaggttgccgattggtacgaatgtgtaaagattttcgcaaaatacggttgggactggggcggaaactggaaaacctttaaagaccttccccattttgagaaaaagaatattcctacaaaaaaagggttggcaaaaacaagctggagaacgctctataaaatgcccagagacaaagacaattatcctgtattttaattctcttttatttgaaaattattttttaatacgtcgagttttgtcgctgcccccatctatctttgcttcagtaagagaacatcaaagcaattattatatcaagctaaaaccaatagtcatttccctgaaatctattggttttacttgtctgaagttgttagatgtttcttttaaaaaaaagtgaaaatcatatgaaaaagacaaccattctttctttggacggaggcggaataaggggaattatcacctgcattattctgcgctacattgaagagcagcttcagttttttgataagccaggcgcaagacttggtgattatttcgactttgttgcgggaagcagcaccggcggactgattgcttctattattctttgtcccgacgaacaccgaaaagcaaaatattctatccagaaaggattagaattgtatgctgaaaaaggtggcgacatatttcaggtttctttttgggaacgtttggtcaatcctttcggacttctgaacgaaaagatctctcaggaagctcttgaaaaaaatctgaatgatttttttggaaatttagaattaaaagaactcataaaaccatgccttataacaagttacgatatagaaaacagaagagcaaagcttttcaattcctggaaagcgaacttaagtaccgataatttttatgtaaaagatgtctgcagagccacttctgctgctcctacatattttagcccggttcagataaaatccatgtacggacagattttcagcctgatcgacggtgggatgtttgccaataatccggctttgtgcgcgtacgcagaagcaaggaaaattccttttgcagaagttttaaaaaatcatcagaaagctaatcatccgagcgtaaatgatatgattgttgtttccatcggaacaggcatcgaggcaagatcttattcttttaaaaaactggaaaaatccggaaaaatcggctgggtgaacccaataatcgatattttgatgtctgccaatgccgaaacagtagattatcagctttctcagatgtttcagactttaggactgagaaatcagaaaaattattaccggcttaatccttcattaaaaaatgcttctcctgcaatggataatgtaaaaagatcgaatattgaaaatcttatacaggcgggattatgttatatcgacgaaaacagagaaactttaaaccagatagtacaaaaactaattaaaaacaaaatataagctttaaaccttataataaatcaatataagcttttttaattatatttaaataataactaatcattatcaatcatgaagacaatatttacatttcttatactcaacattctatctttcattgccggctgcttcattttttattttttgttcgattggttcaatcctccggttacagaagacggacatccatatatgccgattgaaaatgtaatatgttcggtaatcgcagcttttgtctctaccattctatttttcatcttcatcagaaaatatattgtagaaaaattttaattttttttgaaaataataaataatacgtcaagttttgacgtttgctgctcctacatttgaaatataaaataaaacagagcagaagaacaattaaaataaattttgaattcaacatttacgataaatacatattcaatttttaacaccaaataaaaaaacaaaatgaaaacacatcatcatcattctgacattatcttcgacagaacccgttacaccattgaatggagcgatattgaaaatgctgaaacagattacgacaattatcttaatgacatcgaaacctcttacgacggatttttaaaaatgatgacctttaagaaaatatatatcaattaatttttaaacgcatcaagttctgccgctgttcagcagtctggtatactactatccttgtttcgtttttctaaattcttcatttttcaaatgttgaacagccggaactgtgtttaaaaatcatcatcaaaacatctacataaatcaataaacaaaaaattacatatattatgataacaaaagaagaactaaaactttactttgaaaaaggggatcagcccacacaaaatcaattttgggaatggatggattcttactggcataaagaagagaaaatatcacttaaatctactgatcttttagccacagaacaacatcttatgtactctttaacagacagcacagaattattaggtatagccaaagcaattgttattccagagggggtaaaagttattggcgcaagtagtttttctttcagcggtattactaaaaattatattacaaaaattacgtttccagatactttagaaaaaataaaaaacactgcatttttatctcaatatataactggaagtataaatatccctaataattgtaaagtcattgaaatcaatgcatttaatagctataatattaatatatctgaattaattctgggagaaaatttagaatacataggagcttccgcattttatttatccggatccactaaactattcaacctgtacatcccagattcagtacaatcagtaggacaaaacgctttttatattccttcactaaaaaccgtctctgcacctgccggtttagatcttagtaccgccggaattcctgcaacagcagtaattacatacagagacttaccagaataactttaaaattaaaaatgacaacaaaagaagaactaaaactttattttgagaagggagaccagcctaaacaagagcatttctgggaatggatggattcttattggcataaagaagagaaaatagctttggcttctctgccagatataattgatacctacgaatttgcaaccttaacttacgtgaacgaaaaaattggagcagatgacggcggagtctggatctttccggataattcaaaataatcaattatgaaatttagagaaattatagtaaaaagtataaatattgcagaaggcaattatactaataatcaggacgaaattaaatcttttgagcccctcgaaatatatctggttccgagaaaagaaggatcacacgaacgttttgtaaccgataataatggaattatttcaaaacaatctgctgacagcagtgatacatttgataacataaccaatagaggaaactctacaacaaagaatgaaatcgttttggcttctgcaaaaggaagatctgccgcacttggatttaatgaaaaaacttccggatattattttggtgatatgaatcctgagcataccggaagtaataatttaggtttcgggattaatactttaaaaaagttaagctcaggatcctataatacctctgtcggctgttacagtctttctgaagtctcagaaggaagcaataacacaactcttggatacgctactgcatatcagctaaatagatcatctacaaatgtatttatcggtcattatacaggatttaatttgagatcagaaatattagaatcggatttagcaaatatttctcccgcagcagcagcttatatgaaagaacaagttgcgttatcaggatacaacggtacatcatttaattcttctttaaacacttatgtgggtggggttatcaatagtaacggaagtactcctgtaagagcagccatgtcaactattatcggagcgtcaactttaaataatacgttatacagaaattttaataatattgtaattggtgcaggaaattatatgaggacagcaaactctgcgatgaataactcaatcatcattggtaactgcattaatttacctaatcaggtagatgctttggtaattggctcaaataaatcgcgcaggattaattcatcggaagcaatcatatacggagagctgcccaataacagactatcaattaatgcgcctttaacaatcccctctcaatacatgccaaatgctcagggaagttccgagttttccaaaaacatcgtagcaaaaccagacggtacttttggatgggaaaacaaaacatctgatgatttaagaagcctttcctacatgagcgaattaacctatacacatgataacgaaaattattatatcaaaggtacagcatatttatgcatgaaagatggagttgggggaaatgcgggtataggatcatatttaaagtatttgtaaataatactgaaattgcaggaacttctgcagacagggacaattggtatcttagtaatttctcctacacaagcggcgaaggaacttttaacgtttcccagatgattttaccttttacgattacgataccaaaatctacacacacagaatcgtattggacttctggatatttttatgctaccgttgtttcaacccataatccttttgactataataagcctacaattattcaaaaaggagttagattaattcttaaataaaaataatatttaaaaattaatctcataaaaaaataaaacacgacaagttttgtcgccttaaccgcatatatttgtggtagaaacttttagcaatgaaaaaagatttttatcttacaagatacgctttaattataaaaagattggaaagttctccggctacctattcgcagctggaagagtatctgcttaactcctttgaatttcaggatgcagggattaaaggctactctatccgtactttgcaaagagatatccgggaaatttcagatcttttcaatctctccattcataataaaaagaagggagacaaccgttattatattgagagccgcccgattatggaagtggatgaatacaaccagaaattactggagtcttttcaggtaagcaacgctctgaatcttcatcctgatttttctaaccttatctttttcgaaagcagaaagccgacaggtgttgaacatttttatgatcttttctttgccatccgaaacaaacgaattgtttcctttgagcactacaattataaaaataaactgatgacttccagaaaagttcatccgttggctttgaaggaatctaaagacagatggtatcttattgctattgatacgaaagacaaaatgctcaagtctttcggattagacagaattaattatctggatgtttctaaaaataattttagggagaaatataaatacaatttccgcgaacattttaaaaatgcttttggggtaatgaatcttgcggagcaaaatccacagaaaattgttctgaaatgcagcagacatcagggagaatacatcagaagttttccgcttcatcagtctcagaaagaaaccaaagaaacaccggaagaaatattttttgaatttttcctgcatcctacttacgattttatgcaggaaatcctttcctttggaaaagaagttcaggtactcgaacctaaggttttagttgatgatatccgcaaaaatcttcaggagtctttaaacaggtatcttgaaagctaaaaaacttatcatttcgataagtttttttgattacttttacataaatataccaaagtgaaatctttttttgtgcttcttttttgcggtgttttttctttctgcttttcacagcagacagaggaatttaaactcattaagaattattataatcagcaccgttccatgctcggcaaagagtttaagaaaaaatttgatgcggagaccgataattatcataaagcatccataaagctagattatatgcttttcatgcagaaaatggacagtgtagaaaatgtagcgcttacaggagctttgttaaaaaccaaaaatcttgaagatcttagcaaattaaaattactgaaaactttgtctcctgaactttctgcgactccttcggtagttattgataaaatggcagattatccggggggaataaatcagcttcgaaaagaagtggctgatcttttttatctcggtggtgtatattccgaagtaaaaaccgtaaaaactaatgtggcttttattgtagaaaaagatggcagcatcagcaatgttcaggcagaaggagataatttcacattcaacagacaggcagaaatcgctctttattctgtttcacaaaagttttcgcctgcgatcatcaatggtgatccggtacgatatcgttttcggctacctttaaccatgaatattgaaccataaatgtttaccgacgaatatttcatgaaaatggctcttcatgaagctgaaaccgcgttagaaaaagatgaagttcctatcggatgtgtaatagtttccaataacagggtgattgcaagagcccataaccttactgaaaccttaaatgatgtaacggctcacgcggaaatgcaggccataacttctgctgccaattttctgggcggaaaatatttaagagactgtacactctatgtcacaatggaaccatgtgtaatgtgctccggcgcattgtcctggtcacaaatttcaaaagttgtcatcggggcaagagatgaacaacgggggttcatcaataggaacctttctcttcacccaaaaacagaaatcgttaccggaattttagaaaatgaatgttctttaattgtgaaagaattctttaaatctaaaagatgatataaaagttgaggttaaggtttaggataatattatcaatcatttttttaatctgaacctcaacttttcactataaatttttccccagaaaatataaccctttcaaagtatgcaatctgtccatcacgtgaatcttatccgttagaggcttgtagacatgagagactccgccggttgccaccacaaaacaatcatcgtttacctcatcgtttattctgtctataaatccttctaccattcccagaaatccgtagaccattccgctttgcatacaggttacggtatctaaacccagaacagttttgggctttaccagctcaatttccggaagctgagcggtctggctaatcagagaattaagtgcagtaacaattcccggggcgataattactcccaaagtttctccgctttccgcaacacagctcgccgtgagtgcagttccgaaatccagtacaattttttttctgtcgggatacatattatgagccgcaacaagatttgcataaatatcagttcccatctgtttagattttgcctgaacttcggaaggcgtatttctgtcaacaatcacaggatgaatatcatgaatcttttttatcgctgcactcatcacttttgtaagctgaggtacaacagatccgataatgactttactgatttctgcaggctcaattttataggtctgatacagcatcagcatttgtacgtataattcgtctgccgttctgtatggttttgtattaattacccaggaaatatcacagttgtcttcgttaaaaagtccgaatctgatattgctgtttcctatgtttattacaattgacttcatttatttattttcaaaaagatggaaatctccgattaattttaaggcattaaatttactgattttagtaaaactacggtttagattttcttgtatttaagaaacaattatttatatttaaacctaaaatcacttcaactcaaattttcatgaaaaaactgattctgctatttttatttctttcgggaattaacgctttctcacaaactgccgccggcgcaaaagaagtatttgaaaagcttaaaaaagaatccaaaactgatgtaaccgacaaaacagtgtataatattctggatgagttttacaataaaactttgcaggcggaaaatgatgaaatgacggacgaaactataggaaacatccagaatttaatgtccgatcccgatactaaaaacatccacattcttatgcttttcctgatgtatcagcagcacatcagccagactgccgctgtcgggaaaaaatctaatcccgaatttcagatcgaaacaatgaggctgctggaagaagaaacaaaaaaaatctatggaaaaatccctgccatcatttatatctacaaatacgaatcattcgacagtggcgataaaaaagaagaagccaaagctgcagttattcagggactaaaagaatatcccgattctgttcctttaaaagtttatcattacctcaacaccaaagatgaagctttaaaaaacgatttgattaaaaatcactctaaccactggatggtaaagcaatttggaattcagtaaagaatttattcctgaacttttttttatttaagataaatgtatttattgaaaatatttaatctaatcaaaaaataattcttgctttatttagaaaattcactaatttaggaaaaatttaaagcggaatccgaaaagcttagtaagagtaggaaatgacaaacaaaatatcaataattatgaaaaatttaaagaagctttcaagagagaacctaagagcagtacaaggaggctacacaccagaatgtttagaaagcatgagatcttttgaatgccaattagagcctggaccaggactcacttatatgactgtccctaactgtcccggtgtaaaaagatactgtgtctttttataattaattgttttaaattttagtgtacattctactcaataatttgtgtgtagaatttttatttagaacctttcaaaaaaatcctgcagtcaattgtctgcaggatttatattattctgaaaaattatttcacctcaacgaaattatccgccatattcacatcagcaagtctttgactgaaatctattcctaaaaccgacaactgtgattttgtataaggaacagtgatggagtattctttctgcgtccaaggccagtaaggcatcgttttgaattctccgtaagcgtctttttccttccacgtacgagtcatgttcataggaatctgataattgattatttttttgtccgtagttatcacactgaaatcaatcggcatcggaacctgtccgttattcaccaaagtaatagtagtagattttgtatcgtattttacgtctttgattccgtaatcaattgtttttgtggtattgatccaataattctgaaaccatttcagatccattccggatactttctgggcaatgtgtaaaaagtctctgtctgaaggatgttttagcgcccattgatcgtaatactgcttcaatgtttccgcaagattctgttcccccataatgtaacccaactcaaccagatacaattctccttttacataagaagcatacgtataggaagttccgttatcatgatgatctcctaaccagattgccggttcttcgatacctttttttacaaaatttctgtaagcatttaaagaattggcaaaaggattcggaagttcttttgcaggaggaaacaactgattcattacatatccttccgcataacttgtaaatccttcatccatccacggacgcatcggttcattggtcgcaagaatttgctgataccacgaatgcgcaccttcgtgagccattaatcccatcaatccttcaatatcatttgcttcacctaaaatcatggtacacattccatattccatgcctccgtctcctccctgaatgaaagaatatgtcggataaacatattttccgaaatgggaattcatcaactgataatattttgtgatgtaaggctgtgcttcttcccagacttttgttttatcgttattctgatatactaaaaaaaccttcggaccttgcggaacgtcaaaactttttacgatatagtctttatctgcagcccaggcaaaatcaagaatgtttttagcgctccatttccatgttgctttatttttatctgctttaattttagcattagcatcatacccttttacttcagaaggattttccagaattcctcccgctccgattacatactctttgttgattttaatggttacatcaaaatccgagaacggtgcgtgaaattctcttccgatataatcaaatgttgcccaaccgtcgtaatcgtattctgcgattttcggataccattgcgtcatcgtcatatccactccttccctgttatttcttccgcttcttctgatttgctgcggaattaccgcatcccattctaaagtaaatgtagtggacgaattaggtttaatcggttctgcaaggtaaactttcatgaccgtctcctgaatttcgaacttcagtgttttcccgttctgtttgatccaatggatattctgcgctccttcctgatatttcgggatcgaagccaatcttgaaaccccgtctttctgcagtctggaatctccgtttttcccttgtcctgcaactctctgatccatcatcgaattgggcttaaaagcattccagtacaaatggaaatagacaacattcagttcgtccggagagttatttttgtaatctaaagtttgttttccttcgtaggtaaacttttcagcattcacatcaatatccattttgtacttcgcactctgctgataataagctccctgctgagcatgaaactgagaaatgataaatgcaaacaggattgcaaccgattttttcatttaaaattttattttttctaaagataagtatttaaaataaaagcctcaaatatgtgatattttgagactcctatggaattggataaatttttacagagattgttaaaaattttattctctttcatattcttttcctatcagacttaatttttcaaataacttaaaagtaaaatctttaataaaaatgcttttagactgcttcttatttcctttgaaattttcaaattctgttttgtttttttcccagttataataatcattcgttacaatataatctcccgttaataaattataggttttgttgcaatgtccggttgtggttctgtaactgtaatcatagccaataagctgtatttcttttactttttggttaaacctcaattttaaaccatgaccaaaaacgccagtaccttcctgatataccagaaaatccagtacatcatttttgtaatttaacggaataacatagactccattaaataaatcaaaatcaataaaaaacgttttcttttttgaagaaagataaatgattaaatatttttttgtcgcagaatcttctttatattttgattgataaattaccgtcattacatcatctttcttatccttatcaaaatccgcaacaatccttttcatttctttcccattggcagtactttctgtaaattctgaaaatcctttgggaattgtaaattgagaaaaacaataaaacggaaatagtagcataaaagcaagaccagtattcttcatattcttgaaatagcttaatccaataaaagttttttaatcaaagtgatctgccccagatgataatagcaatgctcaatcatgccatctatatttctgagataggttccgtatttttcgtctacaaaagcctcgttcatttttgactcgggcatcttttccaataaatctgcgaacttttcggcatcgcttaaaaatttacttttcagtttctcccactgttccggagattcaattggagataggtcgaagctgaattgatctctgatttccaaatcgccaccttcaaaaacgataattaaaccggcaatataataatcaatatgaaaagtaagcattgcgattgtatttaaggaacctactttggctgttgccttttcccaagaaacattggaaagctgatctttaaagttggtattggcaatccataaaccatctaatgtaacctcccggaatcttttggctaattgtgctgctgaactcattattttacttattaatcattaaaacatatcctgtctttgtaccattggagttaggatcttcccacaaatcgcaaaagccttttttactataaatttttaaagaatccgccggatccgcaacatatactttcgattcctctatcttgtagacaactacaaaatgattgggcttccaatatacaacacaaggtagttgtacattattctttaggttttgaaaatcaacttctaatccttctgatttaaatcctaatgattctgcggcagagaataaattatacatgctcgttcctcgtttaggatcaacttgagtaatctcactcaagtatttatcagtataagttctgccataatattttaaaatcatttttaaacaagtggaaccacaagttttttcatttgtttgcttataaaatggaaaattttgcggttcactttcatttttacaacttagtgtaaaaaaaaacatgagcataaataaaaatatgctcatgaaaatatttcttgttttataaataaaattcattttttaaatggaattattttttcgctgaagattctttctttccgctctgtaagatcttttctaagattcttaaggtgataagatacgtcggttttactcctgttaatcctaaacctcccgaagaaagtgtacttccggtttccaaaggattatcggatgcgtaataggcatacatcacgaataaatccggagtaatgtgatgtctgatcttcgaagccacctgaatggctttctggtaatgcgccccttccatctcaagaccgatcgctttccatgaagtattcataaaatatgaaagaatatccctgttctgaagcgaagttcccaaaacggtaatcatcggaccttcgaaagcttttaattcatcatctttgaaatcatcaagtttcagggcattttcgaacggataattgtctgctgttccttcaaaaatatgtgaagtcgggatcatgatgtctccttttccaccggcaagaattcccgctttacccatgatggaaacagattttaccttcatcatgtacacttcccctttatgttcgtaaggtctcagcaattcgtccattatttcgtaagcctgttctccgaatgcataatcaaaaaccattacgacatcatctcctgcaaatttaatatcctgaaaaggcgtatttctgagatctgttttgctgaggtcgatgatctgcacatcgatattacttccgcttttgtcattaatgtagatcattccctgttccaaagcgtatttggaaaccttatcgcgaagttcttttttgtcggaaatttctccgtacattttgtaatctacttctttatgatcttttttcttcaatgcttcgttggcatacagcatatttttcacagagtgcatattggcagaaatgatgtgaagcggtctcatgtgaagattattttcaaacaaaacttcttttactttattcgcccacttttcaccaaaatagtgatgtcctactctttcctttaagatagcactgaaatgaatttccctttctctggtctgttttgcatcttccagacttactttcgcaaggttgtagatgattttgaataaacggtcaggattttcatcatctccgaaagtattataagcctttaaagtttcatcaaacgttcttcctattaaagaagacaaatgaataagggcaacttctttttctcttctgctgaattttttctcgcccttcaccacttcttcgataattttgaacgctcttgtcggtttccagttttcatcctgaatgaaagccagattgcgaactttatctgcctcaataaataaaaaggtaaggtgggtaagaatatcataaatttccgaacgccccaaaagaacttcaatgttcatctggtgttcatcaattctgtaacagtttcttcttctttttttaggaacgatcggttcgaaacttcctttatcaaaaccttcgtctgatgtaagatgaatgaaggcgcattcttcgattccttctggaagtctgtctaaaacatacatcaaaccatcgagttccactttgctgggcatactcatggtaccgtaaatttccggattgatcgtcttcaacaaacttctaatgctttctcctgaaactccgctcggcttgaaaaaacctctataaaacaggtgtctcatagatatgtatagtctttcaattgcctcggtggtttctcttgctctagaatttgtcatatatttaaaatttttataaaaagtctgctaagttacgaaaaatattttaaatgatattattaatttgctaaccagcattttaacacaattggcgtaacaaacaaaaattatttttctgtcttaaaattaagatttttgaggtgttcttttttaatgtatcagcaataaattttcttaatattaaaagttacagtttaaagttcgattcattttctcatatattaataggtataacaatttcaatttgggaattcaagcccctttaaaaactcattatattttaaaattatattaaatttaaaaagcaccccttaaatttttagggtaaaatatttttcaattcaatttttttgtaaatttgccccgtaaaaattaacctaatatgtcaactttaagattcaaagcgttagaaactttaccattcaaggacttcagaagagataattctgtagaagttcctgtaaaattatcagaattattctgtcagaatgttttctcagaagaaacgatgagagaatatttaacgaaagaagcattccagtctattatggatgcggtaaaaaaaggaagcaaaatccagagacacattgcagatcaggttgcggtagccatgaaagactgggcaatgagcaaaggtgtaacacactacacacactggtttcagcctttaacaggttctacagcagaaaagcacgattcattcttcacaccaattgaaggcggaagagcgatcgaaagattcagcggaaatttactgatccagcaggaaccggatgcatcttctttcccgaatggaggtatcagaaacacttttgaagcaagaggttataccgcatgggatcctacatctcctgcgttcatcatgggaactactctatgtattccttcgatcttcatttcttacacaggagaaactttagattataaagcacctcttttaagagctttgaacgcggtagacgaagctgcaaccaatgtaatgcagtatttcgacaaaaatgtaacaaaagtaaccccaactttaggttgggagcaagaatatttcttggtagattcagcactgtatcaatctcgtcctgatttggttttaacaggtaaaactttattaggacattctcctgcaaaagggcagcagttggatgaccactatttcggttcaattcctacaagagtcatgaatttcatgaaagaactggaaattgaatgtatgaaattgggaattcctgtaacaacgagacacaacgaggtagctccgaatcaattcgaattggctccaatgtttgaagaagtaaacgttgctgttgaccacaactctttgttgatggacgttatggcaagaattgctcacagacatcatttccatattttattccacgaaaaaccattcgcaggggtaaacggaagcggaaagcacaataactggtctttagcaaccgatacaggtgaaaaccttttaagcccgggaaaaaatcctaagaaaaacttacagttcttaacgttctttgtcaacacaattaaggcggttcatgaatatgcagatcttttaagagcaagtattgcttctgcaagcaacgaccacagattgggtgcaaacgaagctccgccggcaattatttccgtattcatcggaagccagttgttcagagttttggaagagcttgaaaaagtaacggaaggaaaactttctccggatgaaaaaacagatttaaaactaaatgtagtaggaaaaattcctgaaatcctgttggataacacagacagaaacagaacttctccatttgcatttacaggaaataaattcgagatcagagcggtaggttcttctgcaaactgtgcagagtctatgacggtaatgaacacgattgctgcaaaacaattaaacgacttcaagaaagaagtagatgctttaattgaaactggtcttaagaaagatgaagcaatcttcaatgtattaagagaatacatcaagcagtgtaaaaacatcatgtttgaaggagacggatattctgatgactgggctaaagaagcggaaaagagaggcttaaacaatttaaaaacaactccggaagctcttaagcaggaaatggatgagaaattcttagcgctttacgaagagatgggaattttcacgcacagagaagttgaagcaagaaacgaaattaaattagaaaaatattctacggttattgatatcgaagcaagagtattaagtgacatcgcaagaaaccacattattccttctgctttaaactatcagaacagactgatcgagaacgtaaaagggttaaaagaaatcttcggagacaaagaattcaaatctttggcaaaagaacagatgagcttaattacaagcatttccgagaatgtttctaaaattaaagtaggcgttgaagatcttattaaagcaagagaagcggcaaaagcagttaccgagagccaaaaacaggctgaagaatactgtaataaagtaaaacctttattcgacaccatcagagatgcatcagacgatcttgaaatgatggtagacgacgagctttggccaatgacgaaatacagagaaatgttatttacaaagtaacatttgtaaagttccatattagtgaaactctccgattgatcggggagtttttttatgaggtatgaatgctttgttaaaacgaaaacaacagctgttataaaagcattaaaaagtagagttaaaaacctgaaacaatcgaaaaaccaatcatttattaacaaaatttataatggggtattttgaattaatttaattgcctatcctttattttacaataatctgcaataattttgttaaagaatcttaataaaaaaaaccgcacacctacccaaaacaggcggttgcggtttatttttttttaacatacgcaaaaattatgttaaaatgtgttaaataaagaacctgacaattgtcatatcggggctcttttactcggattctatatttttgtattgcttttgaaaatatactatcctttttttaacacggtaatcaaatatatatgaagaaaagagttttgttttatctagttgctttcgtctctactgtatcgttacaatcatgtgttacaaactacgtagtttcaaaaccagcaacttacgctaaagaatacaaaacagatgccaaacttgcctctcttgaaacaaacaaaatggagcaggataagcagaaattaatcaactcatttcttgcagaaaaggcagctactttagccaacgcaaaaaattctatcaaaaattctgagattgcaaaagcaatcaaacataacgcaacaatcgataacatcttaaacgaagcacagacttatcttggaacgccttaccgttacggaggaatgacaagaaacgggattgactgttcagcttttgtactttcagttttcggtgcagcagcaggtcttagcttaccaagagtagcagcttcgcagtctgaagaaggtcaaagaatagaaaaagaaaaccttcagaaaggagatttgattttcttttctcacggaagaagaatttctcacgtaggaatcgtagaaagcgtaacagaagacggagaagtgaagtttattcacgccgcaacttcaaaaggagtcatgatttcttcattaaatgattcttattggggtccaaaatacagattcggaaagagaatcatcaacgaaaacggagaagcttacaataatcttgcaacaacaactccggcagcaaacgcagcaagtttttaattttaaataattgatttaaataatgaaaccatcaaaattttgatggtttttttattgtttcgtttttgactaccccgtcttttgcttcgcaaaatccaccccttcagataaggggaattgcttttttctaatactaagaagataaataacttgcttttagtttcacagagccgtttcactcataaaagagcttagataatttttatctcattttgttattaaaattactgtgaaattggactcctgcggagttctgattctgcattcttcatttatactacacagatacaattcctacggaatatttatgtacagaaaatccaaagataaaatgatattagacagcaaaacgatcaacgattaaccatcaacagtaacctatccgtttttatcaatttcaatatcgaactgatgaagaagaccatgaatttcagaaagcgaaaatttagcttttttaagcctgtttgaagcaggattgatggaatagctgaacgatgtacggaaatccgctttttcaaggttggtttggtcgaaaacagctccggagagatcgcatccggaaaatattgcgttcgataaatcgcattcggaaaaatcgacctcaattaattttgaatttctgaatagtgtttttttgattgatgttttataaaatatggaattgttgagaagacagctttcaaatgtaaacgataatccgaattcgttgcagtcgttaaaatgcagtccaaacattttacactctttaaaaaccacctcgcgaaaagctgttgaaaccagattcatcatgctgaggttgcagtcaataaattcgcagtcgttaaaattatagcctgaaagattaacgtattctaaattacagtttcggaaagtacagttttcgtattcgcctttgtctaaaggctgtgtgaaatttctgttctcgaaatgctgatctgaaaaataggattctttcataaactttgttgagagttattttatttcgcgaatttagaagattcaagtatgaaaattaaaacatagcattttaaacttccatcattcgacttctggcttcccgcttttaaaccagactattcttatccgaataatttaatttaaagaaaataaaagtcatcattgagaacgccagtaaagaacttcctccataactgaaatacggcaacggaataccaacggttggaaaaagccccattaccattcctaaattgatggtaaagtgcattaaaagaatcgaggcaaagcaatatccgaaaacgcggttaaagcccgatttctgctgctcggcgagataataaattcgtccgatgtagatcatgtaacagagaataagaacagcgcttcctacaaaaccccactcttcacctaccgtacagaaaatatagtcggtttcctgctccggaacaaatttcccctgcgtaacggaaccttcacggtatccttttccccaaagacctccggaaccgatagccgttttagaatacaacaaattatatccggaagtatccctgaatgctttttcacctttaaaaagaacctcaattctttctctctggtgtttcggcagtttttctaaaatataaggcgcaccgaaagccagaccacataaaagcagcaccgaacctgcaatacctgaaatggaaataatattccacgacattttgtaataattcattgcaatgtaccctccgataatcaggatgatggtaatcgcaatccagatcggatctatcgccaaagagacgaggaaaacccctgcaaaaagaaatcctactccaaacagaactccgctcaatccttcacgatacaaggcaataaaaaaggcgatgaaaaccaacatcgaaccaacatcgggaatggcgagaaccacaacagccggaattccgacaatagccaaagtagttaataatgacttcctgtttttcagattaaattccggtccggaaacataatttgcaagcattaaagcggttccaatctttgcaaactcaacgggctgcatggtaaaacttccgaatttataccagtttttctgcccgagaatttcttttccaaaaggaaaaagcccgatcagcagtaaaacacctccaatgtaaataattcctgacatattttcgaagaacttgcttcgtcccacgaaaatcaccaatccgacgaacagggaaatgcagaagaaaataagctgtttttctcctaacttttggtctacactgtaaatatttgcgatggcaaaagcacaaagcaggaaatataagccaagacctaatttatctattccttctgcccatttcattgtttagcaggttttgttttattatttttcgtttcgatgtctatctgtttctgcagttttgctttctgctcttttataaatttcaggctgtcctgtattcttttttgcttgagagaatctaccggttctttgtataaacctttgcgcttcagatcggcaatccactgtcttttatattcaggcataaagcttgaggaagtcatttttttgtagagattttcacgcttcagatcacctgtaataaatttttcggcgattaccgttgaggctggacctgcccaggttgctccaaatcctgcgtgttccattaccgccgcaaccacaattttcggtttatcagccggagcaatcaaaacaaaaatggaattatcttttccctgcggaacctgtgcagttcctgtttttgccaactgggtaaaatcgttggattttaagccatgtgccgtacctcttaaaaccaccgcttccattcctttcagcaccggttcaaaatgttttttatcaactaaagtctgatgtttctttttgaatctcggatccggattgggctttccgtcgatcgattttacgatatgcggagtgtaataccatcctttattggcaatggctgccacataattggcaagctgaagcggagttaccaatacgtctccctgtcccattccgttgaaaacagcccctgtcgccaaaggatcccagtttttaggatcttttttagaaccgcttgctttataaatggaagccattcttttttcgtaaaattctccggttggaattcttccttttgcacctaccgcaaaatcattatttaaaaattctcctactccgaaactgctcatgatctttttccattcgtcaacccctttcgaaggatttcccggatatttattaatgatcgccaaatacgcgtaggaaaagtaacagttactggaaacctgaatagcaggaatcagcggatctgctccaccgtgacctttaattctcaagcctctgtaattaaatccaccaccgcaagggaagattgtattttcatccatcacgcccatctgcatcgcagacaaagcggttaataatttgaatgtggaaccgggaggataagccgcctgtaaagaccggtcgaaagttggtttgttctcgtagattgtatctttggataaagcgtagaggtttttagatttattcggtccggtaaaaagattcggatcgatatccggtcccgttgctgcgaccagaacttctccgttattgggatcaattgctacaatcgcaccgtgcttattgacaagcatttcttcagcaattctctgcaaatcgtagtctatggtaagtgtaatgtcttttcctgtgataacgtctttgtctaaagatccgtttttgtaaggtcctacattcctcagtttgatgtccttttgaatgtatttcattcccttcactccgcgaaggtctttttcgtaggctttttcaactcctgtttttccgatgaaatcgcccggtaaataatacgcagagtcttttttaatttctctttcgttaacttcactggtatatcccaaaagatttcccgacgtagaaacttcatattgtcgctgaggtcttgaaacgatgctgaaagcgggatatttgaatatgatttcctgaactctcgcaatgtcttcacgacttagatttttcatgaaggtcatgggagtcagcttggaataatatttttcttttttaatattttcgatggttctgacgaaatcatttttggaaatcttcatcaggttgcagaatcctacggtatcaaaatcaggacgcatcaaagcctgagtgaaagaaatttcgtaggcaggctggtttcccaccagaattttgccgttgcggtcaaaaataacccctctttgcggaataacgtattcaattttaatggaagtattggctgcatttaaagcataacgatccgtaaataactgtaaataagcaattctcgctacaaaaatcagagcgataacgataagaacggaaaagatttttaaataacgtgtgttcaaactttttgtttgattttaaagattaatgcgtaaataactataaatataaacgaaattaaactagttaccaatacattaagcaatatttcaaaaaatctgctcaacttgaagaattcaatgtactgaactaaaagctgatgcaaaaagatacttgaaaataaaaacagtaaaaactgcgcccactgcagggactgaaaagagaaaaaatctgtagaagtatctgtagaagttcggaaaatcaaagtcctgaaataagcaatcaaagtggttgcaaacgcattcattccccaggttccgagaaatgcatctacgaaaagcccgataagaaaactcaacgcaagaaactgaaatttatttctgaaaaaaggataaaacatcacgaataccggatagagcaccggagtgtactttccgaaaatggtgatcctgttcagtacaaaaacctgtaatgcaacaagaaaaatcataatcaatatatccgtaaataatgttctgctaatcattttccttttttattacagcctgcatggtatcctgaattttctgaacttcagctttcttgaggtttttcaccacataaactttgcttaaagctcccattttttcacttagttccaccgaaatatcccagaatccggttttattatccacagaatatcctgcaatggttccgatctgtacccctttagggaaaatcgctgattttccgtcggtaaccacagtatcgccaattttcagggcaacatattttggaatatccgccaaatgcattactctggagttgtctccgttccatgttaaggttccgaaatatcctgagttttttaaagcagcattgattctgattttattaacacttaaaaccgactgaaccaaagcatagctgtctgtagaattaataacgattccggcaatccctttcggagccatcacgcccatttgcggaaaaacaccgtctctcctgcctctgttgatggtaaagtagttatttcttctgttgatgctgttgaaaacaatctctccgtcaacaaaagtatagatttgtccgcctccgatggtatcatgaacttttctgaacattggatttttcgctccctgttttccgtaaagttccaccatcaaggctttattttgtgccacaagatcttcgttgatctgtttcagcttaagatacgaaactccttcatcgatatatcccgaaacccaggaattgaaagcagcagactgccctgcaatccatgattgctgcattgcgtttttagagaatatcagaacaagagcaatgatttgcagaaatataaagaagacaaatagcgcattctttgaaaataatctcagcaaaaatcccattcagatgtgtttcgtaaaaagttagaattatttaattaagaaattgaatttatccatattcttaagtgcaatacctgttcctcgaacaaccgctctcaacggatcttctgctacaaatacaggaagacctgtctttttgtgcaatctgtctgcaagacctcttaataatgcaccgccaccggcaagataaattcctgtcttataaatatctgccgccaattccggaggagtaagagaaagtgtttccattaccgcatcttcaattctgatgattgatttgtccaatgctctggcaatctctttataacccaccataatttctttaggctttcctgtaataaggtctcttccctgtaccggaatatcttcgatatctacgtctaagtcttcaacggcagaaccaacttcgattttaattctctctgctgttctttctccgatatataagttgtgatgcgttcttaagtaatacgcgatgtcattcgtaaatacatctcccgcaatttttacagatttatcgcaaacgatacctcctaaagctacaacagcaatttctgtagtaccgccacctatgtcgatgatcatgtttccttcaggtttctgtacgtcgattccaacccctattgctgcagccatcggttcgtatattaaacgaacttctttagcgtttactttctgggcagaatctcttaccgctcttttttcaacctctgtaattccggaaggaatacagattacgattcttaatgcgggctgaataaatttccctttaattccaggaatttttttgatgaattccttaatcatgtgttcagaagcgtggaaatcggcaattaccccgtctttcaacggacggattgttttgatgtcctcatgagttttcccctgcatgtgtttcgcctgttcacccacggcaatcggtctgcctgtcgaacgctcgatcgcgacaatagacggctggtctataacaattttattattatggatgataagggtgttggcagtaccaaggtctatcgcaatttcttgcgtaaacatatcgaataaactcatacttttacttctgattttttaaagagttacaaagatataaatttaagactaccaaagaaattccgtgggcatataatttggttaaatttttattaaaatttgtaatcggctattaacttttgctctaagcatttacagaatttattttaagctggatttaagataaacacaggcgtaatgcaggtaaaacggcagtccttaacttcttcttttttgtgaaatatctttactgagtatccaaatgatgaaaatttatctttttcaacaattatttttaacgtttattaacaacaaaaacattgtcattggtcatcgccgaaatagttttttacgataattatcatatacattatcaaggaatgttttgctaaaaaaaacgtaaatttgccacgcttatgttacaatattcaaacatacatcagacggctaattttgctgtgctttccgtgagtttcgaaaaagctgacgcagagacaaggggtaaatttgcattttttgatgaaaacattaagaattttgttacccgaatccataatgaagatttaggggattcctttgtcgtttcgacttgtaacagaaccgaaatctatacaacttctcccaattatcttttggttgcagaagaatattgtaaaacaattggggttaatctgatggattttcttcagtttgccaatattttaacgaaggaagaagctttaactcaccttttcagagttgcagccggactggaaagccagattatcggagattttgagatcatcggacagattaaaaaagcctacaaccgtttcaaaaaagaaagacagaactctaatccttatctggaaagagccatcaattccgccattcagatttcgaaaagaataaaaaacgaaaccggaatttccaacggagcggcttctgtttcttatgcggcggttcattatatcttaaacagccagaaaagaattaccgaaaaaaatattcttctgcttggtgtaggagaaatagggcagaatacggttgaaaatctggtaaaacacgtttaccagccgaaaataaaaattgccaacagaactcaggaaacggcagctaagatttccgagaagtacaatattccgcatattgattacgccgattttgataaagaactcggcaatacagatattcttatcgttgcgaccggcgcaagacatcccatcgtgaacaggtctcatttcccgaacggaaaagaaactttggtaatcgatttatccatcccgaataacgtggataaaaatgtaaaggagaatgaaaatgtaacgctgatcgacgtggatgaactttccaaacagattcaggaaaccattcagcagagagaaaaagagatcccgaaagccgaaaaaatcatcaaggaaatgacgaaagacttccttgagtgggaaaaaaagagaaaactcgcacccaatatccatcatttcaaagcggttcttaagaatatggaacgcaatgaaatgcataatttttacaaaaaaaataaatacataaacatcacggatatggaactttctgataaaatgatccagaaaattaccaaccgttttgcaaaatatatcatcgataatcctttaaaagccgaagaaattagtaaattaatgcacgaaatattagttgaacaaccaaacaacgaattcaatgaaaagcattagaatcggaaccagaaattctgcactggcactttggcaggctagagaagttgcgaggcatcttcagaacaacaattatttaacggaaatcgttcctattgtctcttcaggcgataaaaaccttacacaacccctgtattcattaggaattacaggcgttttcaccagagatcttgatgttgccttattaaatgacgaaattgatattgccgtacattctttaaaggatgttcctacaaaacttcccgaaaaccttgagatcgtttcttatctggaaagagattttccacaggatgtcctgatccgaaaagaatcggcaaaaaataaagaacttcatgagcttaaactggcaaccagcagtttaagaagaagagcattctggctgaaaaacttccccagtgctgaattttcggacattcgtggaaatattcagacaaggcttcaaaaactggaagaaggagattttgatgcgaccattctgtctctggcaggaattaagagaatgaaaatggacattgattatgaaatgattccgtttttaattcccgctccgtcgcaaggtgtaattgctgttgcaggacattcagacaaaactgggatcaatgaaatcatcagacagtttaccaatcataaaaatacgcagatctgtgtggaaatggaaagaaatttcctgagcacgctggaaggaggctgtaccgcacctatcggagcatttgcagaactttttgaagatcagatccgtttcaaggcagcgctttgttctctggatggaaagaatagcatcgcaaccgatgaaagcttcatatataataatgaagaaaatttcggggaaaaatttgcaaaaactgttcttgaaaacggcggaaaagaattgatggcggaaattaaaagccagatctaaaattcactttttacattttaacttttaaggttccggacttctatgaagaaatatttctcaatatttattgtagttctttgcgtgttttttggaaaagcacagaatcagtttgcccaaaaactgtctgatgcggctttaagccttacaaaagaccgtgtaagttacgatcctgcctatttcaacatcaagtatccgaacggagacgttcccgcagacaaaggtgtctgtaccgatgttgtgattcgtgcttaccgaaaactggggattgatcttcagaaggaagtgcatgaagatatggcgaaaaacttttcaaaatatcctaaaaaatggggactgaaaaagcccgacacgaatatcgaccatcgcagagttcccaacctgagagtattctttgccaaatttggaaaatcaaaatccattgaaaccaaaccggaattatatgttcccggagatattgtaacctgggatcttcctggaaatttaacgcacatcggaattgtagtgaacagaaaatcggcggacggaaaaaggtatttaattgtacacaatatcggaggcggacaggttttggaagattgtttgtttaagtttaccattaccggacattatcaatatcagaaataatggtgagaaatgtaatctgcttattggtttttatgttgataggttttgcatcagctcaaaaaaacgaactgaaaatcatcagtaagcccatcaattattctgaagaaagagttcgtttaagtttagaatatctgaaagagcatcacggtctggttcagaaaacaccgacgattgttccgaaaatgatcgttcttcattatacggcaggcggaaatgtggagagcaattttaaatatttcaacaaaacgcatcttgaaaatgcaagaaataccctgaaaaagcaaagtacgctgaatgtttcttcacaattcatcattgacagagacggaacggtttatcagttgatggaaccgaatcagtttgccagacatacgattggtttgaattactgcgccatcggaattgaaaatatcggaagtaaaaaagaaccgcttacggacaagcaggtttccgcgaatgcacaactgatacggtatttaacccaaaaatataaaatagaatacctcatcggacattcggaatacggaatcttcagaaattcaagactgtggaaagaatctgatccgaattatttcacaggaaaagaagatccgggaaaggattttatgaacaaagtaaggcttcagaccgccgatttacatctaaaagataaaccataatgaatattttatttaccaaaaacctagatccggcgattgtaaccaaagaattgggagacgatgtttcgtttgattgtgttgaggtaattaaaacaagttctctaacaattgagtcttttgatctcaaagattattcattgatttttaccagcgcaaaaggagtaagctccttttttaaaaacggatttaaacccaatgaagattttacggcgaaaaactacaataaaatctactgcgtcggtgaaaagacgaaaaaagagctgagaaaaaacggtttcggaacgtttaaagtcctgaaaaatgccgaagaactttcacggtttatcattatgcactgtcagcaggaaaaattccttcatttctgtggaaacatcgcattagacgtgcttgacaaaaatcttcctcttcaaaacatcagctacagaaaaatcacggtgtacaatacggaggaaatcaatccgttgataaatgaaaaatatcatgccgcagtgttttttagtccgagcggagttcgtagttttgcaaatcgaaattcttttggtgatatgattctggtttccattggagaaacgactgccaatgaactcagaaagcatacttcaaagcctgttttggtttcggaaggaagcacattactttctgttctgaagctgatccgaaaagagattttaaacaaaaattgatattttaattgtcattcttggcaataaagtctagtatattatgattaaaaacgacctatacttaaaagcacttcgcggagaaaccgtagaaagaccgccggtttggatgatgagacaggctggaagatatttgccggaatttattgcattacgcgacaaatacgacttcttcacaagatgtcagacaccggaacttgcttccgaaattaccgtacagccgatcagaagatttcctttggatgcagcgattttattctctgatattcttgttgttcctcaagcgatgggaattgattttaaaatgaaggaatctgtgggtccatggttggataatcccatcagaacgatggaagacgtgcagaatgtggtggttccggatgtgaatgatacgttaggttatgtttttgatgccattgaacttactttacagaaattagataatgaaattcctttgattggttttgcaggttctccgtggacgatactctgctactgtgtggaaggaaaaggaagcaaagcttttgatattgccaaatctttctgctttacacaaccggaagcggcgcatttattacttcaaaaaattaccgacacaacgatcgcttatctgaaaagaaaggttgaaaaaggggtttctgcggttcaggttttcgattcatggggcggaatgctttctccggcagattatcaggaattttcatggaaatacatcaaccagatcgttgaagctttaagccctttaacgcacgttgtggttttcggaaaaggatgctggtttgctctggaagatatggcacagtctccggtttctgctttgggcgttgactggacgattaagcctgagtttgcaagaactttaaccaatcatacaatgacgcttcagggaaattttgatcctgcaagactgcattctactcctgaaacaattaaaaaaatggttactgaaatgatcaaccgtttcggaaaagaccgttacattgccaatttaggacacggaattttaccgaatattcctgtggaaaatgcagaagcgttcatcagagcggtggtggattggaaaccgaatgctgagttttaatcttgccatggaatctgatgtttttgtcattccgtaggaatctcaacaatatattaatatattttatacaaaacgcagcttggattcctacggaatgacaaaccgtatgtaagatttatttaaaatttagcgaaaaataaataaaacaccctttcagcaattgaaagggtgtttctatgagtaaaataatcaataattacttgatttctgtaatgaattcttcttttggttttcttactttggttaaattcactaaccagtcattggaagcatttctgtaccgattggtaacaaaagaacgctttttaaacctttttcctgcaggtttaaaaccttatcaacttcttccggaacaaagccttccatcggggtagaatctacctcttcgaaagcggctgcaataatcgctgctccaaaaccgatataagcctgttttgcggcatgagtgaagttttcttctgcagatctttgcggataagtatttaaaagactttgtctgtaattttcccaaccttcatttttaaatcctcttatttcattggtaagatcaaacattgcattgattctttcttctgtgtaagtatcccacgctgcaaaaaccaatagatgcgaacaatctgtaatctgcggctgattccatgcgtgaggctttatctgttctttaacttcctgattggtaacgacaatgatttcaaaaggctgtagaccgcttgatgtaggagccagtcttgccgcttctactattttatccactttttcctgtggtactttctgaccgttcattgctttggtagcatatctccagttcagtttttcaattaattccatagattaaattttaactttcacaaaattaaatgatataccacaatttttgatgcatgattttcaaatttgatgtattggtaatatctataatacagaatcctcttctaccggactggaaatctgatcggcaaaatactgctccagatctttcagagtttcagggttggtctgaatatcttttaccaattgtcctttgtttaccactacaattctgttgcatacttctgtggtatgcgaaagatcgtggctggaaataaggaaagtcaccccatcttgtttagacagttctttaattaaatttttaagcttaatctgtgtggaaggatccagattggcgaaaggttcatccagaataatgatttcgggatttccgataatagctcctacaattccaacttttttctggtttcctttggaaagatcgcggacgtattttccggagtttaaaatttctccgctgaaaagatcatgaaactgttttaaaaaggcatcaacggaggctttattctgccctctcagttccccgatgaaatagaaatattcttccggtgtaagataaccgatgaggaaagaatcgtctacaaaagcggaaactttgtttttccatgcttcagatacatttacttttatcccgtcgatgcttacaaatcctgtggaagcctgaataagatcaagcattaagctgaaaagagtggtttttccggctccgttgtttcctaccagaccgaatgtttcccctttcggaatttccagatgttctatatttaaaacggttgcttttccgtatgtttttgttaaattattaatggtgatcatattaatctttgtttttgaatgcttctaatgtgctgtatttttctactttgtagtgttttacgataatatcgaagatcttttctctgatgaaaaatccgattactcccagaactccgatactgataactcccgctgtaatactgaaaaatttctgcatcaatgcgaaaacaagcatcggaagaaacatcttcggaattaaaagcaggagcgcttttacgttaaagctgtttttctgtccgaatcttttttctttggcattaagatccatctgcgttttgttaaaaactcccgaccaaagtgtaaactgggaatttactccgatattgtaaattccggcagcgaagaaggtaagatacatttcccagccgaaataggcatagcaaaccgccagaatcatggaaaaagcggtgacaatattcatcagccaccattttgctttcaggtattctttgtaaggaacattcagcgtcatcatcaaaggatagtaagagctgtcgaaagcgggaacccgctgtccgaacataaactgaaatcctccggttacaaataatcccatgaacatcatcatcgccggtgttttgtaaatcggtgacgaaaacatcagcaatccgtagaaaagaaacataatgcttccccacaaaattcctttcgttaccttattgcgtttcagcattttaatatcgttattgatgaacgttccgatcgctccgtatttgttgagaaaggtaatattctcggttcttccaatctcttttttagcttccagaccttcatccagataaaatattttccggatatggttgtagcagattcgccacaacccgaaaaacaacccgattgaaatcactacaaaataaggtctttcaaaaaaattataaaaaaaccgctcagaataatccagaaccggaacaatattgtaatacgccaatcctgcaactgccgcaaaaatacatccgacaacaatggcaatggtttctttatcgttaaaaagaatgttgataaaattattgaggtaaaataacagcgaaatcccaatcagccatccaacaacgcctaaaacatcatatcctttgaataatgcaatgatggaaaaagtaatcaggaacagggaattgaaccaactgaaagctgacagaaatgtttttcctagcatataattcaccaatgtctttttgggaatattcagcgtaagaaacggcttgatattctgtgtcggcaattcctgccatatgtatttggcaatgagatcgaccgcccaagccacaatcatgaattttgaaaccacttttatgggattctgatgcatttcttcctgaatataaaaaaatgctccgaaagctcctcctacaagacaagccataaaataaagaatcccgataaaacgaagaatcttcatcgccagattgattcctaaagaactgccccgaaaaaagcttttgatttctaacctgaggaattttaaaaacatagctatcttttattacattagtttgtataaagatagaattgttacagaaattgaatgttgtatggatggaaaaagaaaaccgcagagattttctgcggtttttatttttactttatctttctgtaaattttgtaaacaaaatagacaagcagtattagcaatagaaatataagtgtttgtattgcgaatagtccaaaactgaattcttctatatgtttttccataattttattatcagatcattttttaattcatgattatatagcttaagattaatgcggagagcaaaaatagcccgagaaaaaaataaccaagcgattgatttccttttttaaactctctgattgaaataaccagtgcatataagagaagagaaacgacacctgtaattataattattatgacaataattaataggaaaaatagtatgatcatcgtttattatttctaacccgcagaaaatttctgcggttttcttttaattaaaatcatgcaaagctattttcctaatcatacccggaaccagagaatttttctgttttatgtataaaggataatatttttctaatatttcctttactttaaacgcaggatgatatgtggatcttatttcttctgttacccacatttccgactccattagctctattttatctggaaactcaggcattccgtcaattttacgatgtttaaaaatttgagaataagaacattttattttgaaacattgtattccggatatttttttcttctcatctctaaactcttgtatttttaaattttttattcgttcaaaaatataggaatattcctgtattccgttataaggatattcagaatattctttccctttagaaaaatcagtaaataccggatacttcagtatgtcgttgttttcttttgtttcccatcgtttccagatattttcatctacatttttgtaatgatagactacaatagaattatccaaatccttctgtgatacggaattaattatactgtcagattttttttatctattgcttttgtcttagcttttctgcctaaagactcaaaaagtgcatccgtcagtaaacccatctcactttcaaattttaccattgcctcctcctgtcccttcctatattcttctaaattggtaatagaatctttttgaacaaaagaaatatctttaaaagataaatttttattctgagaataaaataaaccccacattaaaaccatcaataatattaaatgttttctcatttttttatttttatgtaaagtaaataatctccttttttttactgtcaattaattttgtaaacaactttaatttttttattattgacagtaaatattttataaaaaatttttacttcttttataagtatgctgtctttatttagcttataataattatagtcaaaagtcttatcattaattggaaagcatatatttttaccatcaactgtagtgtaaattgcagaagtaaaatatttgctttttatatttgatattttacttaaactggatttttcatcactatttaaacatattttacctatatcttgtacttttaattgcaaaacacttaaatctgaatactgaactttacagccttgaagcaatataatgccactaattaccaatactttaattaaacactttctcatttcaatttgctttttctaatttgtgttaagatataaattaatccgtttgcatatggagtcgcggaagttcctgagattatacctgtagcttgattataataaagtttattatttggattggctcctaaacttgcacttcctgatgcgttatcataaaatgtaaaatatttaccagaattatcggatcccatacctactataactataaaatgatcagtagtttgatcagcattaccaggatgtccaggagcatcatgtacaccaacaataacaggtatattatttgatagggcatattttagataacttagtcctgcaattaaattagattgattaactccagtttgttctctataaatttggtaagtttgtcctggtgcaccatagttagatatttgaaatccttttattgcaatttgtgccttcgcataatccatacaatttcttttgattccgggatatccccatccaatgaaattaccaacaggaattatactaggaattgtaggccaattttgttgtaatgggtcaaaattatcataaaccgtagtatcatatcctcccgtagtgttattgtcatcatctcctaatgaagtttcatatattgttttattatacatgagatattcaaactgttcccaagttgtggtaggattgtctaacttaaattgcgctgcccagctaataaacgcttttgcttcactgcttccattatttgcataaaaataactgctcaagccatcataaaaatctgaattcgcataattattcaataagttctttaaattcgcaggtaggctgtttacatatagagagaaacttcctgagagagtaggtactgttggtacaccaatagggcaaggattatacacagcaacaggatcaagcggattttgaaatacctccgttatgcaattatcgttacctgcatttcctccccctgtgccgtcttcagatcccgtatttccggaaccgctttcacttcctccgcctcccgatgagcaagaccaatagccaatggtgtaaacctgtggttttatttcggcagtacaattaatccagtcaccaaaattactctggttatggatatgctcactgcaatcctgccagattgtttcttccacataattacattccgtaactttcgaaacattaaaactgccttcagcttcataaatggtagtttttccttttgtatctactggtattccgtttaggatattctgcttctcctgttcggtgaaattgtagcggaaaattaatcctttgtaggttccgtcgggaagaggtgtgagaacaagattttctacaggagcattttcttctgtattttctttaataatattgaaagtgtaggtatgataattgggtccgttttctatataggttacatgatcggtatcaatggatatattattgattgtttttcctgaaactttagattttaaaaacgttgttgcttttgaaatttcagggataagctgtggtttatgtttgctttcggctaaagaaattcttttggaagataattgaaatttattaattgagccagttgaagcagattcatcattcatgttttctgttctgcatccctgcaataagaacgctaatgccataagcattatgaaataactttttttcatttgttattaattttttttcgagtgttaaattataattttttttgatatttcaacatagggagaatcctatattttacattttttgttatgcggtttattttatcccgacctattcagtattttcatcgctttaagttttttaattaaacattttcatgtgcaaaaataaatttgcggtacgacaaaagctgtcgtattaattttaataaaaagccttagacaaaattgatcgggagatagaatcatgcaaaaggcacggagcaaaagccgatctgacaaagaggtactgcgaagaacccaaagaccaagaaagactccgcccgtgccagttataggtacacgggcgtaagtctatcaaaatttggtcttttaagaaggttcgcagttttctttgttccaaattgatagcttacgcttgtttcgttaaaattataaatcaaaagtaatcatttttttgaaatgaaaaacagctttgtttttatgttaaatagaccccaaaataaaaaagacctcagaaatccagaagtcctatatcatttatttcgttaaaacctatcctatcaactctttcgcttgcgccaaagccgcttcggtaatcttacttccggaaagcaactgtgcaatctcgttcagtttttcttcgtcacttaatgggacaatggtagattgtgtttttccggcgatgtcctgtttcaggactttgtaattgttgtttccttttgcggcaacctgcgctaagtgagagatgacgatcagctgcatatcggcagacatttcacgcatcagatttccgatctcttcggctacttttccggaaactccggtatcaatttcatctaaaattaatgtcggaagttcatcgctttctgcaatgatcttttttaccgccaacattacccttgatctttcaccaccggaaattgctgtctgtatcggctttaacggaaatcctgagtttgcctgaaacaaaagctggatattttcttttccgaatggattaaagtccgaagaatcgtgcagttcaatatcaactcttgctttttcaagccctagttttttcagtaaagattctgcttttttgatgaaaacagggatgcttttttttctatttttcgaaagtttttcagccaaagactgaagtgttttttcttttttggaaatattttcctccacttcttcaatctgagcctccagttcggacgcgccctgctgttctccggctaactgatctctgatttctttgagttctgtaagatcggaaacgttatgttttacaaaaagattattgattctgttgtttaattcaaccagtaacgctaaattttcaggattcacttctatgctttccgcttcatcttccagctcggagataatgtcttttaattccacaaaagacatttcaagcctttcatcaagctctgcaaaactctgggaaacttccgcaattttggcaagtttatttttcgcttcattaaaaaatgacaaaattcctacttcttcctgatgaaatcttgataaaacctgcgccagattatcggagatcatttccgcattttcctgaatggaaagctgattctgaagttcttcataatccacattatccagatgaagttcctcaagctcgttcagaagaaacgctttatagtcactttctttattggaatccgaaagctgcgtctgtagttttttgagctgtgttttaaggctttgaaaatctgaaaattcattctgatactcatgaatgatctgcttgttttcagaaagtccgtcgatgattttaaactgatattctgccgtaaaaagattcgacgtttcaaactgggagtgaatgtcgatcaactgagaagacagttctttcaaaatatccagtgttacaggaacatcattgatgaacgctcttgattttccggaaggtaaaatttctcttcggataatggtctgatgttcgtaatccagatcattttcgataaagaattttttgaactgattgttcagggaaaattctgtttctacgatgcttttttcttctgcttttgagatcgattttacatctgctctttcacccagaatcaatcggagcgcacctaaaatgatagattttcccgcaccggtttctccggtaatcacctgtaaaccgttgtgtaatgatacttcaagggtatcaataagggcaaagtttttaatgtaaattctcgaaagcattgataatagcgattatttggctattgcaaatatagaactttagatttcagaattcaagagaattactgtttccatttattccatcttgcttcggtattttttggcgaaaggatgatcatttcattcttaagatctcccaaaacaattcctccgttatttccggaattgaagatgttgaaaatctcatctgccttggaatccatgaaaagattgaagaaatatgcctgttggaatgagttttcgtattgttttagctgcattaaagcatcaaaaattacttttttgccctgactctgatcctgattgaacaggttatccagtcccgctctgtgataagaataaatcgttgcacgaagctggctccagttcgggctcatgatttctttgatgaggatagaacggcttctcggctcattgatctgcttccaaccgtcgtaggtattctgagattctccgttttgtgcaatctgctgtgctttctgataccattgtgttcccgccatcgactgaaaactgtctgcatccattcccaaaataacatacacgtaaaaactgatgacatcaattaaattttttccggaaaactgtctttcgttgaagataaggttttcgttttccacataatcaaaagagaatctggtatcctgaaggttaagtaagggagattcatacgtggtgttaaaaacaggacgaactgcctgtactacaatacttcctctgaaacggtttccgtctctttcgctgatcacgattgcgaagttggatttaattttttcaaaattctgcagtctttttcctgtccagcttgtattgttgatgaaatctctcaaacttttctccagagctttgtaggcagactggttacttcctcccaattgttgggaatttacctgtacggttgccagtaactcctgagaaaaactctgactgaataaaaacagaagtaaaaatatgcttaaaatttttttcattatctactaaaaattgagaacggaaatttattaaaattattttaaaagttgagactcaacaaaatccaaaatgtcttttgccacttcatctttagatttcagatcaaattctgttttttccgttttggtaaatatttttattttattggtatcatttttaaaaccggctccctcatcacgaagcgaatttaaaacgatcatatccagatttttcttttccagctttcctttggcattttcctcttcgttctgagtttccaatgcaaaaccgactaaaaactgatgggttttcttttcacccatggttttaagaatgtccggatttttaaccagttcgatcgttaaattttcatcattctttttgattttttccttttccacttctttcggagcgtaatctgcaacggctgcacttgcaattccgatgtctgttgtatcgtaatactccagaactttcgataacatttcttttgctgaggtcaccttatataattcaacatttttattattgattttctgagagctcggtcccgaaattaaaattacttttgcgcctctttttgcagcttcttccgccagagaaaaccccatctttccagaagaatggtttcctatgaatctcacaggatcaatggcttcatacgtcggtccggctgtaattaaaaccgttttccctacgaatgttttttcagttttagaatcaaaaaaatcttcgattgattgtgctatggtttccggttctgccattcttccctgcccgattaatccgcttgccaattcaccgctttccgccggaataatatggtgtccgaaactttctgccaattccagatttctggttgtagacggatgtgcatacatatccagatccattgcaggtgcaataaaaacaggacattttgcagacatatacgttgcaattacaagattatcgcataatccgtggaccattttagacaatgtacttgccgtgcatggagcaacaatcattacgtctgcccacaaagccatttcaacatggctgttccatgttccgttgtcactgtaaaagtctgagtacaccggatttttggataaagtggaaatactgagcttcgtaacgaaatgttctgcatcaggcgtcataatcacctgaatttcggctcctttttttacaaaatcacggatcataaaatgaattttataggctgcaattcctccggaaatcgcgatgagaatttttttaccggaaagactcattcaattttaattttttaagaatactaaattacttattttttctcacaaagccgtccaaacaacaaaggtcataaagaaaaagatttccttatgaccttcatatataaaaaatacactgatttttattttctctcttcagtttttctgaagtacacatcttcgttcagccattcttcaattgcaatagaagtcggctttggaagtttttcgtaatgtttagagatctcaatctgttctctgttttcgaaaacttcttccaatgtagaattatgaacagcaaactcgtctagcttattgtgaagttctgtacgaatttcagcgttgatctgctctgctctttttcccatgataacaatcgcttcgtagattgagcctactttgtcttcaatcttatccttatcgtaagtaatggtatttacttctgcttttgtatcttttacactcattttgagaatattaattttatttaagttcgcaaatttacgaattatcttttaattttgaaagtcgccgccggcggaggtgtgctaattgctgcactgtccctctggatctgcattgctttcttttctgcttctacctgatctttctcctgctgaacggtttttgcctgttccgcattcttcgcttccagctttttctgtctttccgttaaaacggcaattcttgcttctgtatttttcttaactacagcaaattctttcttttctttttcaagcttgcttctgatgtccaaagcagttttagaaacttcggtgttcggcatttccttttcgatctgtcttgtgaaggccaatgcgctttctatacgttcatctttaagatcatacaccgattttgtagccagttcgtaacgagactttacgatataatcataaatctgcggacgaagttttgtactcgggaaatcttccagaacgttttcaaatgctacattggcagctttgtattctgccattttgtagtattgtcttgcattttcgtacgctttgaactcaagcttataagacagttcgtcaataagcgtattgatatttttagatctttcggagttcggataattatttaagaaatcctgaagttcgttaattgctgtttgtgtggtagactgatccagattataatccattgaaccttcgtagtaacacagagcagacatataagccgcctcttcccttcttttatcctgaggaaagctgattgcaaaatttttaaactgatttcccgctaatctgtaatttttgtcataataattcgcatacgccgaattaaaaaccacattgggagcatcatctgtacctgcaacaaggttcggaagcctgtcgtaaagtgctaaagcgtttttccacttctttttagcaaagttttcattggcagtttttaagataagatttttatccgcacttttcattgctctttcctgcttacttacgcacgaagctactactgctacagtaaaaatacctaaaatatattttttcatataaaaagttcaacagttttcggattattcagccgatttactaatttgcaaaaatataacttttttgccaatagatttttttttatgattatttaacgtaaatttagtctgcagcgtatcccaaaatggcaaaaacggtcattaaaagattcattctcacttttttctcagcttcctttgtgtaggtttcctcacttttgttaggaacatagagttcataaaaattccggttgcgaattacgaataaagtagaaccaataatggtggttaaaatatcttcaggtttgggagtgaaagtaaaaacacccgaagctacaccttttttaatgacttcgtctaattttttaacgaaaagctgataaaaatccagcagttcatcttttaaattttctgtatggcgaagttcctgtgtaacaaacccatggaaataattatatttaaataactgagaaacaatatatttaacaatttctttcagctgcatttccggcttcccgtctttaatggtatctgcaaactctgaaaaagtttctcttgtttttaaaaccctgtactgataaagatacgacatcatcttttccttcgagccaaaataataggagatcatagccacattaatatttgccttcgaacaaatatctctcacggaggttccctcatatcctttttttgcaataagttcttccgcgatatctaaaatgtgaatttgtttttctgtaaattttttcttcatgaagtgtagtttaagtaaagttatgaaatttttaacagatttataaacgttcgtttaagaaatttacgttaaatctaaattaatactatttttgaggtatggatttttttgattttcatcatcataaaaaaaatataccaaacggaatttataatctgaatattgagcagattccgccggatgttccgtattcggtaggcattcatccgaaagatattgatgtaaataatcttgataatcagtttaaatggatgaaaaacatgatttttgaaaactgttttgcaattggtgaatgtggtctggattcttttgctgaagctgaagagaaaattcaggaagaagtttttttaagacagataaggtttgcaaatgaggttaaaaagccaataatcattcattgtgtacggaagttttatgaagtgatttcttttaaaaaatatacagaacagcctatgattattcatggttttaataaaaaagaaaggattgcggaagatcttctgaaaaataatttttacctgagttttggaaaagcggttttgtataatttatctttgcaaaatactttgaaaattactcctttagataaaatctttctggaaaccgacaatgacgatttcagcatcgaagaattgtatgagaaagtatctgaaataaagggaatttcgctggaaaatttaaacaaacagatttcggaaaatttagagacaataaaacatggataaatactggttggaaagaacggagcttctcttaaaagaggaaggtttggaaaagttgaataaagcaacagttcttgttgtcggtttgggtggtgtcggttcttttgcagcagaatttcttgcaagagccggagtcggaaacatgatgattgtagacggcgacacggtagatatcaccaacattaacagacagttgcctgctctacattccacagtaggaaaacataaagttgaagtggttgccgaaagattgttagacattaatccaaaacttaacctcatcaaaatcaacgaattcctgaatcctgaaagaatggaagaaattcttgacaacggaaagtttgattatgttctggactgtatcgacagtgtaacgcctaaactttgcctgataaaagcagcaaaaaagagaaaaataaaactcgtgagttccatgggagccggaggaaaaacagatccgagcaaagtgatggtgaaagacatcagcaaaacccagaactgctatctcgcaaaacaggtaagaaaaagacttcgaaaagaaaagataaacaaaggatttaaatgtgttttttctgatgagctgcaaaaagacgacagtttaaaaatgacggacggaacaaattataaaagatctttttacggaaccatcagctttattccggcgattttcgggttgtatgccgcagcggaagtcatcaattatttaaccaagaaaaattaattttttcctgcagattttaaggacaatcaaaaatctttttgcctgaatttttaaaatctgtgggaaaaccatcttacaaatcctatctttacagtccgtaaatgacaaacttcagatatcccagagccgaaaaactcaagaaaaataccgagatctctttacttttcgaaaaaggtaaatggagaacgaatgggaatctgagaatcattatccttaaaaacaaaccgacaactcctgttgaaagcacgaaatttgcggtttcggtttccaaaaaatattttaaaaaagcggttcacagaaaccgcatcaaaagacttttaagagaatgttaccgtctgaataaagatctttttaaagaagctttcggcgataaaacaatggcaatgatgttttgggcttccccggaaatgcctgaaaaatttcaggatgtagaagcgcagtttatcaaactttgtcaggctcagaagaaatcttaatcttttctatcgcttatttttccgtttattttttaagttgaatttcattcacagtatttttatcagaaaatttctcagaatttatttttttgtaccttcgggaaaacaatcaatctgaaaattaatatgttagacagtgttccttatttaccttatctcctgagtgcgtttatcggcatcggactggctgcagcaagcggattcagagtatttctgcctatgtttgccgtaagtcttgcttcgtatatgcactggattcccatgaatgaaaattttgaatggctttcgggacttcccacgttaatcaccaccggaattgcaacggttgttgaggttttagcctattacattccctttgtagaccatttgctggatacgatttctgttccgatggcgacgattgcaggttctgttctgtttgccagtcagtttgcagatctgggaacttttccacagtgggctttagctttaattgcaggaggaggaaccgcagctaccatcagttctggatttgcgggacttcgggctgcatctacggcaactacgggaggtttgggaaattccgtcgtcggaactgctgaaacagccggagcaggaattatggcttttctggcaatggcagctccaattattgccggaatctgtgcaattttaattgtgataggagttatcctgttcggacgaaaactatggcgaaaattcaggaaaaataaagaacttcctcaacagacataaaagaaaaagagcggaaaaattctccgctcttttgtttattttttattcatatattcctctggagaatatttccttgcatctgaaatagattgcatccttggataaagaaataaggataatgcaactactaatactattgctaaagcaataaagatttggctttttttcatattattaaatattaacaatttttgcaaatttgttgttgattgcaattataatagttatttattacattttgtggatcactcggactaatatgtccacaatttactaaaataccaatataagcagaaacaccttcccagaaagaacaatttccccaataagtagtaccattcaaatttcttgtacaagaactcccatcatgagttccaaaaattttgaaaacctcattgtctgtagcaacattttcgtcaagtgttgacaactcttcaaaatacattagagtttcatcttttccatatttaacatataattgatctaaatatttttcgccctgcaaggaagcttgatataatgaagtagcattattatccttgactgaccttaaaaataaataatagttatcctttaataaaggtataatctcatcattcttaaattcttctattgaattttttgacagtttggaattgatagaagtctgttttgacttagtatctgatttgatttcacttattcctaagtctgaggaattactacaagagcaaaccgaagaaagggcaataatccccatgataatttttttcatagttaagttattaaattaaaaatagcatttgcttatacaaatatataaaaatcaaataaaagtgatatattttttttatgtgatttttatgtgattttcagaccataaatttatatttgtactaaatattcaatatgataaaatcaaaattaatttcagaacgtaagaaaaaaggatacacacaaggacagatggctgattttattcacataagtcagtctcagtatcaaagacgagaaagaggagaaataaaaatttcggaagatgaatggggaaaactcgcaaaagttttaaatgtggaagttgaagatattaaggaagaagaaattgttcaaagtattattaataattatgacaatagctctggaagctactcaccacatataaacaacaattataacattcctgaatttatgttgaatggtatggaagactatattaaacttttaaaaagggaaattgaaactttaaaagaacaaatcaataatttatcaaaataagcaaaagtccatttcataaccaatgaaaatggactttttgtttttttctcgatatttttggagaataatttttcagtacagtgaattcttaagcaacatcattaatttttgagttcgattcttgtttatttaattttcctgttataatttccaagaagaattcctaaaggacctattacgggaaaaaggattaatgccaaataaggcagaattccagattttgttttcaacagaacagcaattgctgcaatgtacaagatgatgaccgcaaccgcaccaaaaaggatctgaaaagcgttaatagacaataagctcattgtattttttttttaggttatcctttggttctgaaatctttaatttcctgaattttaccttcgtaatattttttcttttcaggggttttcttgatcagaatttcaaatgcttttatggctttggtatataatttctgttcaaaataaagatttgccagtgtttctgtcatcaaatgcgagatatcgtctcctttttcttttacaacaaaggtactttcttcttttaactgactgattctcggattgttttcgataaaagtctcaatcacttttgttttcagatcggttttttcctcttctggcttttcctccgttctgtcgattttcagccagctttgccatgtattgatgaatcccggaacattgctgtcgaaggtattaggtttggctgtttttgcaggtttttccacaggaatttcaactgtactttcttctttgctttcctgtttgggttcttctgtcattttttctttttctggttgaggaatcgtccatcccgatccgaaaaatgaaacgttcattaccggaacttcctctttattttcttctgaattctcagaaatattttcatccgtgttttgttcagttgtttcttcagagatttcagaaactacactttcttcagagttcagctcagtttcggcttctgcaacttgctcctgctctgcaatctccggctgctgaatttccactgcttcatctgttttaagctcttcagttttaggctgaggaacttcgggagatttactgatcagagaatccggaagattggaatcaaaagacattggcttccacgcagactgaacttccgtttcttcttcttttgccggaatttcttctttttctttactgacttcggattttggttcctctgtctgttcagaactgttttctgctactggattttccgttctaatttcttcctgagtttccgtttcaacaggctttacttcaaaactttgggtttcggcaaaactgatgtcgtgaccgatattttcaggctcttcttcttttttatgttcttccgcagccgctttttccttcattttcttctccacttcttcaatgagacggcgcatttcgtcttcatgcttattgaggttaagctgaggagcttccgtaattttttcttctgtatttgcctgaattttcacttcaggaagaaaagattctgttccgtggaaacttagctcagcatcattctgaacaaccttttcttctttctcggatgaaatttcatcttcatcaataatggtttcaggcgtaaattctgcggactcttctgatgaaattatttctgaattttcagactcgctgctttctttttttggttcttcaacagattcatttgcagagacctgcacttcaggaaggaaagcatctgtttcatgaaagcttaattctgattcgtctaaaacttcttctttttcagtttcagtatttagattttcctcttcaacaatggtttcagaagtgaaatctgaaatttcttcagaagatttttcctctgaattttcagattcgtttaaggcattttcagaagtttcttctttttcttcttctactgttttattttcttcatcagcctgaatgtcagaaacagtttcctgttcataagactccggctctgaattatctgttgatttattttcagaaactgatttttcttcttcagtagcatttttaggaacagattcctcattttcttctgcaatcggaagaatattttcagttggtttttcttccgaaacaggctcttcttttttctcagctttctgggttacgatagaaccggattccagtgtggattcgagatcaatagtttcaaaagtatcatcttcaagaaaattttcttctccttcgaacagaattctgtttcgctctccattgatgtaaagatgcttaatttcttctctcggaggcgggagaatacgatctgtttctttagtttctgtaacggcaggtaaagattcctcaacaatttgcggttgaggttcgcttgcaggatttccctctcttttaagtggaaaacttcccgcttttttctgatatagaattttaagtggattttctgaaggaatatttttttcctttaccgtttccagttttatttcaggttttggcttctgctgaattttaccgttaatcagctgataaaggatttttttatcggttgtataagcggctgttgtagaaagtactgtctgataattatctttatcatacagatgcaccccatacaaatacaacgctctgatattctgaatatagggaaaagaattaatctcttctttcagaagatggagatcttctgactgaatgtttttcggggtctttaataattctaaaactctatgattcatcttaccagttcgctacaatatcgttaaatatcttgtttataattctgtctgttgcaattttcacctgagaagattctatctcagactgggaaagattgctgttgaacaccgcttcatcactgtatgttctgtcgaaactaagctccggatgaagtttgttctcgtaatgtacttttacagtaatggtaagtttattttgggattcctgtattacgcctcctgaattggtagaaaccgtattggaactgatggttgtgggtgtaatagaataatctgtaatttcaccttcaaccaaaatgtccggattttccttcgttcctttcaaagtcgttctctgcaggaacctgttttggatatccgtagaaaactgctgagacaatgtaggattcaccaaaggggcattattgggaaattcattaatctgaattgttttttcatctttaagagatgaccccgtaaaactgtaacacgaattaagcactgataaacacagcactaaaagccaaaatttcggctttccgatttgaatatttttaattttaaaattcatttttaattccaatttcctgaatttcgtcataagtaacctgctttaatgcatcttcgtatgcaaaataatgagaagcatatgcaaaaggtattgtaaaaatcaagccaataaaacatgctataactcctaactgagataaaaatcctaccgccagtgaatataaaaagatggaccaaaggtttcctttactcatcaccgaagagattttccatgcctgtttaatctctgtaactcctgcaagggaaattaaagcgggcatataaaaacctttcagggctacaaataaaatcccaacatacacaaaaaacatataaatgaaaaaaaatgcgggcggtccggcggaaggatcctgttctcccattgcgaccatcatgataaacatgggaatataaataaccattattcctgcgaataaaataagctgaatcataaagtaaggcgtgaaattatcaaaattgaaaatatctcctgcgcttacctgtcttccggctcttaaatcacggcaatatttataaaaatttcccactgccaaaagtccgcaaaaaggaatgatcgacataatcattgcaaggaagaaagcgcccaacaaatttccaaaatttgctttgtagaattcgtatccgtcgctgatgtaatctcctaatttgaaattgaccggttttgcattaattttcaccatgatttaatttttagtttattattcttctaaattatattgttttatttttctgtataaagttctttgggaaattcccagttcgtctgccgctttgtttcttcttcctttatgcttttccaatgctttgataatcaaatctttttcattattctgaagcgataaagattcgggtctgttttcttcaatttcaatatcttcgtagctgttgtccggctctgaaataattgtcggattctgaactaccggattatgattattattgttttcaaaatacagtaaagaaccgggagccacattctgctgtgtttcaggagtataaattctgttgattaaatttttctcgtgactgctcagatcagatgttcctctgttttttatcaattccgaagttaaggattttaaatcattaatatcgtttctcatgtcaaatagaattttgtacatgatttctctttcgcttccgaaatcgttctgctttggcgtattcggagtattgacaaccatgggaagatgtgattccatgggaatatattccgccagtttttcaacttctacgtgtctgtttctttctacgaccgtcatttgttctaccaaatttcttagctgacgaatatttccggggaacgtataattttcgatataatgtaccgcacttggctcaagttcaagttccggcattctgtatttttcagcaaaatcgatggcaaattttctgaaaagcaaatgaatatccccttttctttcacgcaaaggcggcatatcgatctgcactgtattcagacggtaataaaggtcttcacggaatcttccgtcctgaattgccttcatcatatttacattcgttgcggctacaattcttacattggttttctgaacctgcgaagaacctactttcataaattcgccgctttccaagacacgaagcaaacgaacctgcgtctgtaaaggaagctctcccacctcatctaaaaagatcgttccgccatcggcaacttcgaaatatccttttctggttgctgtagctcctgtaaatgctcctttttcgtgtccgaacaattcggaatcaatcgttccttcgggaattgctccacagttcacgacaatataaggctgatgtttccttttggattctgaatggataattttcggaataaattctttccccactccactttccccgatcacaaggactgaaatgtcggttggtgcgacctgtatggctttttccaaagcacggtttaaagccggaaagtttccgataattccgaagcggttttttatattttgaagctcgttgctcataagtaaatttttagattattgatttgaatatgatttacattaattaattgtaaatctgctgtttagtttaaaaataattgagtttaaatttaacttacaacgtccaaataatctttatttctgacttttgaaactctggttttaaaatataaaatttcagcgaagagcgtttctctgctgttcttttcaaaatttttcaggagctgatcatgtttttctttttcagaaaaatcggttcctgttctatcgtgatgaaaattgttcttttgtttatggaagaaaattttaccgataagatcaattgcaggatgcttttgattgatcgttatattctgtacaggattttcttttgtacaggtttcctgtaaatcttcacaaccctgatttaaaatccggttataaagctcataaagctgtttacagtcttcactttcggctgttccgttggaaatttgagccgaaatattgctgcagattattaccaacaatacacttaggcaatatttatgaaatttttccattgtctgagtttaaaatgttaataaaatcttgtttacttggcaatatggtaaaatatttacttgcgaaaatctgttcgttatcttccggtaaagtatatcttaccaaagcttcacttttatcctgacaaagaataatgcctatggttttattttcaccctcaaagcgtttttctctatcgtaatagttgacgtacatctgcatttgcccgatatcctgatgtttgagttcgccgatttttaaatctattaagacaaaacatctcaaaactctgttgtaaaacaccaaatctatacggaattgcttttcatcaaaggttattctgtcctgtcttgcaacaaagataaatccggttcctaattccagaagaaaatgttccagtttatcaattaattcggactctaattcattttcagaataatgaggtttttcagacagtcccagaaattccaaaacataaggatctttgatgaggtctttgggcttttctataatttgtccttttttagcaagctgaagaatctcttctttatttttgcttaaagatagtcttgcatataaaacagaatcatactgtctctgcaattctcttaggctccagttgtttttataactttcaatttcgtagaacttcctttcattactatcagtgattctcattaacttcaaataatgagaccatgaaaggttgaattttatagaatcttgccgggctggtttttgatttgttattactcctgattcatcagacagtgtttgtcctttttcattatgcttatccgaatcttgcaaaaagacagacggtgtttgtccttttgaatagacaatataaaattgcctaatttgtttaagatttgaaacagaaaaccccttaccaaatctttctgtaagatgtaatgacaaatctttaagaacagccttaccatattctgctctgttttccccattctgttcatcttccacaatcattcttcctatttcgtaataagtaagaacaatggtttgattaacggcaacaacaactttatttctggcattttccaataacgcagaaatatcatttaaaagttgctttgtcgttaaatcgtcagacatattttattttgaaaccgtttcccctaaaagtgtgccctgtgtattgtcaaaaacaaaaacgtccacaatgtcaccaattttctgaccttccagtttatcgaaaacgcaaactgcattctgggaatttcttcctttccactggttttcgttctttttggaagttccttcaattaaaatctggtgaactcttcctacataagatttcattctttttctggacagttctccctgtaaggcaatgacttctgccaaacgtctctgtttaacgtctgccggaatattgtcctccatctttttgtgagcgggagttcccggtctttctgagtaagcaaacatataaccgtagtcgtattccacttctctcattaagcttaatgtatcctggtgatcttcttctgtttcgctgcagaaaccgacgatcatatcctgagaaaaagcaacttcgggaacgatttcttttgcttttttaattaaatctaaatattcttcgcgggtgtgctgtctgttcatggcttccagcatattgttgcttccgctctgaaccggaaggtgaacgtatttacagatgttatggtgttttgccatcattctgaatacatccagactcatatcctgcggattggaagtagagaaacgaattctcatttcaggaacggcttttgcaaccaaatcaagcaactgggcaaaatttacggctgtagctttctgcatttcagatgctttggcgaaatcttttttaggaccgcctccataccaaaggtaagaatctacgttttgtcctaataaggtaatttctttatacccgctttcccaaaggcttttgcactcatccagaatagaatgcggatcacggcttctttctcgccctctcgtaaaaggaacaacgcagaatgtacacatattgtcgcatcctcttgtaatcgttacaaaagctgtaaccccatttccgcctaaacgaaccggattgatatctgcatatgtttcttctttcgaaagaattacgttgatggcatctcttccgtcttcagtttcttttaaaagattgggtaaatctctatacgcatcgggaccaaccacaagatccaccaactgttcttcttctaagaatttggttttcagtctttctgccatacagcccaaaacgccaaccgtcatgttcggtttttctttcttcaggtttttgaactgtgaaagacgcattcttaccgtttgttctgctttttcacggatggaacaggtgtttaaaagaattaaatctgcttcttccgcttttaaagtggtattatacccctgctcattaagtatggatgcaacaatctcagagtcagagaaattcatctgacaaccgtagctctccaagaataatttctttgagttttctgctttttctgcaatggcaaaagcttctccctgttttgtttcgtctatatatttttcctgcacgataatcgaatttgaggtttttaggtttaaggtttagagcacatcactttgaactcaaaacataaaactttgaaccaattgaatttgcaaagatacaaaatattgtgacagaatgtcaggattatctttcatagaaatttgtggaaaaattcatggggtaaactattttatcttttatagggatgttagaatataaagctggtttccagacttttttaagtcgagacaaagttctcagaaaatcgatattaaattttggatcataaatctcaggatagattctgggatttgtaatttctcctttttgattgatataaaactccagattaacgttgccattaatgtgatagtctgtgaacaaactcataaactcatcatgaaaatcctttctaaatctctcgtacccttttggatactgtgcagacaaaacataattattcgcgttatatccttctttataattttccataacatcattcggatacaatatgaattctgccaaagcaccgaatttaccacctttcacttccgcgggtttccagtgtttcagatttttcagaagttcaagcgacagatcgtatgcacatctgttttttgcaatatttgtagtgtcgttatcttttaccaatttcacagccgcatcttttgttaccacaaatcttggctgataaatttcctgatcgctgcattttttaaagttagcagctgctaaataatcatgcgcttctttgtagaaatttaccattccgccttcataaaattcctgatttttagggtattcatctaaaacctgagcattcgatacaaaaaagatgacgattgcagaaaaactcaaaaactttttaatcatgatcataagtattggtactgaaattcaccttcataacaaattttgaatcgaccggaacgccgtttttctttgcgggagtccattttccttttacttttttcgccgcatatttcatatcgtcgataaacatttcattgtttttgaatttcggaaggacatcgatctgactgatctttcctctggaatcaatattaaacacaaaggtcacttttccctgaatggcatacagagccatatcgatataggcatgaaccatattcatgaattctttctgaaatgcctgatcgcctcccggaaattctgctttctggtaactttctgctgtctgctgaacctgagtagtattttcctgagaaaagcctttaccgccaataagcaataaaggtaaaattaaaagatattttttcatggttattaaaagttgtcttatacatctgttgctatggaagacagattcatttttattttgatctgagatgttacaggctgtccgttgcagcttgcaggaatccagtttttcttaattcttcttaccacatatttcatatcatcaaaaaacacctgactgtttgaaactttcgggcttccttcgatattggttacttttccgttttggtctacggtaagggtaaatgtgaaatcaccattcagaacataaaaatctgtattcaggtaatcgtacatatattttctcagcatttctttgtaagcgggaattccgccttcaaaacttgccgccttaaaatcgttacagttttttacggctacctgcaacagaggctcttttatatctattttgagaatatttttattgttctcggtcataaaattatcgtctctttcttctacatcattaaattgggcaaaagcaaaatttgatgcaaaaaacgtaagaagtaatagtatcgttctcataggatttttcattaaaattaaatttacttaaacaaagataatacttaaaccaatgagagaaaagcattatctgatgatagatattacaatagatctttaatgtgtttgtaattgcttttcacagtgtcgagtgcttcttccatttttccacccaacataagctgagccatggattttgtcattcctaaaacctgagcggcttcaatttttggcggtaaagccagtgcattcggattggtaaaaatatttaaaagataaggaccgttatgatcaagacattctttaatggcagcttccacatcttcaggtctgtttacattttttccgggatatcccattgcatgagcaatcattgcaaaatcaggattaatcatatccgtttcattgtccggcattcctcctacttccatttccagttttaccattcctaaagaccggttattgaacacaataattttcactggtagtttatactgaaaaatcgttgccatatctcccaaaagcatggataaacctccgtcgccgcatagagcaataacctgtctttcaggatatgctaaagaagctccaattgccatcggcatcgcattcgccatcgaaccgtgattgaaagaaccgagcattttccgttctccggttcctgtgatatatcttgcgccccaaacacagcacattcctgtatctacggtaaaaacggcatctttttttgccagtttatccaatgtgtgggtaacaaactccggctgaatggcgttttcggttccaggatctttcacatacgtaagctgattttctttaaccttttcataaaactcaagctgctgtttaaggaaattggcatcagtcttttctttcaataatggcaaaagtgctttgatggtttcttttacatcgcccgttaatcccaattccagttttgctcttcttcccaatcgttcaggagcttcatcaatttgtacaattttgtttttgacgggcataaatttctcgtaagggaaatctgtccccagaagaatcagaagatcggcttcgtgcatgccatgataagcagaaggaagtcccagaagtccggttaagcctacttcattgggattattgggctgaatagacatttttccgcggaaagaatatcccaccggagcttttaagtattttgaaagttccacaacttccggattggcattttctgcaccaattccgcaatagatcgttacttttttactgtcgttgattaaatctgcgagttcttttaactcttcatctgaaggacgaataacaggatttgttctgaaaattttattggaagtcaccgcttcttctgcatccagctccgaaacgtctcccggaagaccgattaccgcaacgccttttttggaaattgcatgctgaattgccgtctgtaccgtccgctgaacctgttccggtcttgtaatcatctggttgtaatgactacagtcgtcgaataacttaatggtattggtttcctgaaaataatccatgcccatttcttcacttgggatcgtggaagcaataacgagcatcggaacatgagaacggtgcgcttcataaaccccattgattaaatgaacgtgtcccggcccgcaacttcctgcacaaactgcaaaaccatccagttccgcttccgcagcggcggcatacgctcctgcttcttcatgccttacgtgaatccattcgatgctgctttttttaacggctatatttaaatggtttaaactgtcgcctgtaacggcataaattctttttacattagcgttttcaagcatttctataatttgctctgcaatatttttagccatattttgatgttttagtgttgattttcagaaatattttggaatggactggtaatgtagagatgtaaagattatgccaagagcgtaaaataaatattaaaaaacaataaaaaaagctccgcattttgcggagcttccatatatcttcgagcggaattattttgtattctgatttgcaaaagaatctcttccctgaaacgccagtctgccgtctgaaggtttcaaatctcttccaaaacttaatccaacggaaacattttttggttgatttactgcaaaatgttttttcattctgcccaaatctctttttacttctctttcaaatcctttatcataaagctcaggcaaaagtttaacgtcggtaatatctccgttttcatttactttaaaattcaacgtaaaatcaccatttacctgaaatgcatttgctgtatatctcaaattattagtgagatcatattcaaatttttcctgtccgcctttgtaaacattttctacctgatttttaaccgaagaaacatttacatacgtctgggaaaatgaaaaggcaaaaaccgttactgccaaaactgaaaatatttttttcataaattattactattttgttttataaagttaagccttttttaagaatctacaatacctcgatctgatttttcaaaagatcttcgaattcatctctttttctgatgaggtgtgcttttccgtctaaaaacagaacttcggcaggttttaaccttgaattaaaattggaactcatctcaaaaccataagctcctgcattgtggaacgccagaatatcgccttcccttacttcattcagctttctgtcccatgcaaaagtatctgtttcgcagatgtttcctaccacggtataaattctttccgctcctttcgggttcgataaattttcgatcacatgatacgaatcgtagaacatcggacggatcagatgattgaatcctgaattcaccccgacaaaaactgttgctgtcgtctgtttaatcacgttggctttcaccagtaaatatccgctttttccgacaaggaatttacccggttcaaaccataattcgaatttttttccggttgattttgagaattcagagattactttttccacttttttccctaatgttttcacgtcggtttcttcttcggtgtcctgataaggaattttaaatccgcttcccatatccagatatttcagattcgggaaatgttcggataattccagcatgatctccaaagcctgaagaaaaacatccggatctttgatctcgcttccggtatgcatatgaagaccttccacattaaggttggtagatttcatcactctttcgatgtgacgaacctgatgaatggaaatcccgaatttactgtcgatgtgtcctgtagaaattttatagtttccgccggcaaaaatatgcgggttgattcttactaaaatcgggtaagagtttccgtatttgttcccgaactgctccagaatagaaatattatcgatattgatgtgcaccccgaaagtcatcgcttcttcaatttcggcaagatctacacaattgggcgtaaaaagtattttttctttcgtaaagcctgcttttaatcccagttttacttcattgatggatacacaatctaatgaagctccaagatttttcacatacttcaggatgttgatattggtaagcgcttttgctgcgtagaaaaactttgtgtgttttaggaaagaagaggtaagtttctcgtattgtgttttaatggattcggcatcgtaaacatacaccggggtgccaaactcattggcaatctttaataattcttttgaattcataatttctttttagcataaaaaaggcagatccttcgaaaaaagagtctgccattaacattattttttatgcaatacaactcttttatacattccaaaccttagagaacttcacagttccctttttaccggttttatgttgtttaaaatttagcattgcttcttttaattttttacaaaaatactaattcttttttacttttaaaaaactgattttaaaatgattcctttcagattcagccttgttcttttatttcggtaaaggcagggtttcaaaatctcctctcagcaaagccaactgcagctcatttacaagatctgcagactgtgaaagaagatcaatctttaatttatttagcttgcctaaagtctgaatctgcgtgaaaagctcataaaaaccgtaagaaaccactttcccgttttcgacaatcaaaaacagtttttctcccaatttcctgccttgtcctaaccagagttcatttcgttttctgaattcgattttctttttaaaaacctctatatcattatattcttcaaactttgcgatgaactgtacggctttcgatccttgcgtaaaagatctgaatttcaaaatcggtttttccagtttattcagcttgtttttttccacaacatattttccgtttctgcaatacagaccgaaaggaaggatttctctttttttaattccttttgaattcagaatcagcttggcaatgatatccgttccggtaagttcgtaattgatctgttcaacgtctttctgaatggcttcccattttttagatttggaattgaaaactttttttgaaaatttgttaacatcctgaacatgatcggaaaaaatgatctttcccgcttcattctgaaaatatacaaagcctttttcattgggaagatcctgcgttaattccttgattttgttgatgtaagtcttggaattggtttcatcatgctgcttctggatgatttcgttttctgtgtcttttgaaatcagaagtttgaataattccaacgttgctcttgcatcgccttctgctctgtgatgattggttaaaggtattcctaaagatttcaccagttttccgagagaataacttacctcatctggaatcagttttttagctaaaggaattgtatctaaagtattgattttaaattcatatcctaatctttgaaacgattggcgaagcattctgtaatcaaaatcgatgttatgacccactaaagttgtatttgccgtaatttcaacaattcttcgggctatttcatggaatttcggtgctgttttaaccattttcggggtaatattggttaatttctgcacaaaaggggtaatatcactttcggggtttaccaatgaaataaactggtccacaattttctgaccgtcatatctgtaaaccgcaatatcgataatgcattctttcctgtaacctgcaccattactttctatgtctattattgaatacatttaaattttttacaacttcttttggattaacgattcatttcctttacatctggaaacataacttatgccaatacatcaataggaataaggcaattctgctaaaataataaaaatatttatcttcgtcttcctcccagaccaagcattcccaagattgcttttgctccttcgcgcatcagtgtgctggtaaaggttcttcccgccctgctctgtaaaacctgctcgaaaattccgggctcttcttttacaggctttgtcttctggttagaagtctgcgatgcttcctgtgcagcctgttccattctgcccactaaaatttcatatgcagattcgttatccactactttgtcatatttggcaaccagagctgatctttttgttaaatctgaaatttccgcgtcattcagaacgtccattcttgattcgggggaaattaaataggtatgaaccagcggtgtaggaattcctttttcatccagagcggtaacgaaagcttccccgattcccagattctggatcagcgttggagcatcataaaattccgtggtcggataattttctactgctttggagatttcctttttatctttagcggtaaaccctcgtaatgcgtgctgaattttcagaccgagctgagaaagcaccgattcgggaacatcacctggaatttgcgtgataaaatagattccgactccttttgaacggatcagttttaccatggtttcaatctgtgagaccaaagcttttgaagattcatcaaaaattaaatgcgcttcatcgataaacaaaaccagctttggttttccgctgtcgccttcctccggaaaggtcatgtaaatttctgcaaagagggaaagcataaatgttgaaaacaactgcggcttgctttgaatgtctgcaactctcagaatgtttaccactccttttccgtctcttgtttccagtaaatcgtgaacgtcaaaactcagttctccaaagaaaccggaagctccctgctgttccaatgcgacgatggatcttaaaattgcgcccagagaagcagaagctatcgaaccgtaattagaagaaagttcagcttttccctgtggattttctgtgacgtactgaaggacttttttcaggtcattcagatcaattaaagggagacctttatcatcacaatatttaaatacaatcgacatgatgctttgttgggtatcattcaactgtaagattttgcttaataaaaccggaccgaattctgtaacagtagctcttaatttcacacctctttcgccggaaatggtcattaattctaccggaaaagcctgcggattgtacggaagctgcgttttggcatatctttcctgaatagccggattttcagttcccgcttctgcaatccctgaaaaatctcctttaatatccaataccagagacggaattccctgatgcgaaagctgttctgcgaaaacctgtaatgtttttgtttttccggttccggttgctccggcaattaatccgtggcggttgatggtttttaacggaatggtaacattcacttcaggaacgacttcgccatccagcattccttttcctaatataatatgatctcctttgggagtgtatctcgcatttaattcttcaatgaattgtgttttgtctgccatttgctcttttttaacctataaatataaagttttttgtaaaatctgaccacgatgaatcattaaattaattttggttctgaaatatttcatataatcaaaaaatcatccgaatctttcagaattatttagatgaagaatcgtaaattagaacaaataaaaactttatagatttattctatcagtatccattttttattttggtggtatttaaaaaaataaatccgatttttgtatttcaaatataaaacattaaaacggttacaatcacataatgaaagtcgaacaaatatacacgggatgtctggctcagggtgcgtactacatcgtatctgagaatgaagcagcgattatcgatccgctaagggaagtaaaaccttatctgaaccggttggaaaaagacggtgtaactttaaaatatatttttgaaacgcatttccatgcagactttgtctcgggacatttggatttaagcaaaaagacaggagcgcctattgtttacggacctaccgctcagcctgagtttgaagccattattgcagaagacagccagatttttgaaatcggaaaagtaaaaataaaagctcttcacactcccggtcacacgatggaaagcaccacttaccttctgatcgacgaaaaaggagttgaaacagccattttcacaggagatactttatttttaggagacgtgggaagaccggatcttgcccaaaaagcgggaagtattactcaggaagatcttgcaggaattttatatgacagccttcacacgaaaattatgcctttggatgacagcattacggtttatccggctcatggagcgggttctgcgtgtggaaaaaatatgcagaaggaaacagttgatattctgggaaatcaaaaaagaacaaattatgctttaaatcagccagataaagagtcttttatccgcgaagttttagacggtttaacggctccaccgaaatatttcgggatgaatgttgccatgaacaaaggcggttatgaaagtcttgatgcggtaatggataaaggtttaacagcggtttccgttgaagatttcgaagcgtttgctgaagaaacaggcgcgttaattttagataccagaagtccgggagagttttataaaggatttgttccgaattctgtaaatatcggattaaaaggagattttgcaccatgggtaggaactctgattgtggatgtaaagcatcctttactgcttattgtagatgaaggcatggaagaagaagccatcacaagactgagccgtgttggattcgacaatgtattaggctatcttaaaggaggttttgaagcatggaagaacagcggaaaagaaacggatgaggttaaaagaatttctccggctgagtttgcagagctttacaatgaaaactcaaaagtaattgacgtccgtaagatctcggaatattctgcggaacatattgataatgcttacaataaaccgttggacgtaatcagcgactgggttcacacgattgatgattctgagcattttttccttcattgtgcaggaggctacagaagcatgattgcggcaagcatccttaactctaacggaatcagaaactttactgaaatagaaggaggtttcggcgcaattaagaaaaccgagaaactcccgacttcggatttcgtatgtcagtcgaaaacaatgtaatattaagatttttagaattattgcattaaatataaatgtcacagcgctttagtttattgactgaaaagtatttaacgacacaaagttttcggtaaccttcgattttttttaagtgaatttaaactagtaagcttttcggattattaaactaaagtgtttctttttttattaaaaaccaacaactatgtctcaagcatttcaggaaatcatcgattcagaaagacctgttctaatcgacttttttgcaacgtggtgtcaaccgtgcaaagtacagtcatctgttttaaatacggtaaaggaaaatataggaactgcagcaagaattattaaagtagatgtggatcagtatcccgctcttgccaatcagtacggcgttcgcggagttcctacattagccatatttaaacagggagaaatgctctggaaagaaagcggtgtgcatgatgtaaatacattgactcagcttctaaagcagtatgcataaaaataaagattaaggctaagattgagaaaattttagccttaattttgatatatttatttcctttaaaattcaattgaaaatgaatcgcggtcatttaaaaactgaaaatggcttctgaaatctttcagttcttctaaatttaattctgccgttacaagatttccgtttttctgtgaaatttcttttccgtctgcaaaaaaacagtgtgaactttcctgataaaacaggttatttccatcggtcccgattctgtttaatccaaaaacgaaggacagattttcaatagctctcgcttttaacagatgttcccatgctcctactcttttttcgggccagtttgccacatataagaccgcatcataatcgtcattatttcttgcaaaaaccggaaaacgaagatcatagcaaacctgcaaaagaattctgaaccccagataatttacaatcactctttcttttccgggagtatacactttatcttcccccgaaaaagaaaaaagatgtcttttgtcataaaaatcaatctgagaatcgggctgcacaaaatacattctattgtagaattttccgttttctttaaccggagcacttccgcaaaatgcagcgtttttttccttcgacatcttttttaaaaactccagcgattccagatttctatcggaaacttcggaagcatccatacaaaagcctgtggaaaacatttcaggcaaaagaaagagatccgcttcctgattctgtaattccttttcaatgaggttaaagttttctgctttgtttttccagatgatatctaaattcaatcctataatcttcataaattttgttaaaaaacttccctaaaaatacgatttttcaatgatttcggttttatttttgttgcggatatttaatcaatagaaattggccttattttttggttaatcgcaaagaattttatttccgataaaatttataatgaattatcattgaatagtctatgcttttcatgcgtcttaaagtgtcatgatagtcaaaacttaacgtttttgcgatgaatcaacaaaaagtaaatcatattagtaatcagtaaaaagtaaaatttatgaagaagttgttttttatgtttgttctcatgcttgcgggaacatttgccaatgctcaggcgtggacaggaaaaggagatcagaaaatcaatgccggactgagcgcatggggttacggaacaggaattacaggaacctatgattatggattgaataaattaatttctgtaggagccggattaaatatctattttgataattacaaagacaatgatgataaaaaccgtgcttttgtgttcggaagaatcaattttcatctgaaagacgctctacagcttcctgaaaaacttgatatttatccgggggcagatgtgggagttgtaggcagtaatttcgggttgggagctcacatcggagcgaggtacttttttactgaaagaatcggcgtttttgcagaagtcggcaacaatggcagtctcggagtttcgattaatttataataaatcatcacattatatgacaaagcttctcgtttcggggagcttttttatttggcatagttttgataattgttacctttgcaaattaaacataaaaagcattaatggaaatagcaatcaaactgtttcaatttatattgagcatttctatcctggttatcctacacgaacttgggcatttcttacccgccaaatactttaaaaccaaagttgaaaaattctatttgttcttcgatccgtggttttctttagccaagaaaaaaattggagaaacggaatacggaatcggatggcttcctttcggaggatatgtaaaaattgccggaatggtggatgaaagcatggataccgaacagttgaaacagcctgcacaaccatgggaatttcgcgcaaaaccggcttggcaaaggctgattatcatgttgggcggtgttacggttaactttttcttagcctggttaatttactcgtgcctttcgctttttaatggtgaaacatacacagatcttaccaaattcaacaacggaatcggggttacggaagccggaaaaaagatgggtttccagaatggtgataagatcattaatatcgacggaaaacctgctgaaagattagaaaatgcttccatcaatattcttttgggagataatgtaacggtactgagaaacgggaaagaagtaaccttccctgttaataaggatggggttgcagaagttttaaaacaaaaagaagccaaactttatattacgccgagatttccaatgattatcgattctctggcaacgcctgcttctcaggcttccgggctgaaaaaaggagaccaaattgttgcgattaacggaaaacagactccttattttgatgaagtaagttcttccttatctgaaaataaaggaaaaacagtaaacatagaagttgtaagaaacggaaaacctgaaacaattactgcatctgttgacaaaaacggaaaattaggtgttggtgtagatcagaaagcattagcgaacgttattacggataaaaaatattctttcggagaatctattcccagaggttttgaaagatccattgagtctttaaccatgcaggtgaagcagtttaaaattatgtttaattctaagattcagggatacaaaaatgtaggaggaccgattgcgattgtaaaaaacatgccggtagacagaaatgctaatggcgaaatttcgatcaactgggctgcattttggggctttaccgcgatgttctcggtttggctggcattcctaaacctgatccctattccgggattggatggaggacacgttcttttcacgctttatgagatgatcgttggtaaacctgttcctcagaaagttttggaaaacgcacagatgatcggtgttatcttcctgttaggcttgatgttactgatcttcggaagcgacattttcaagatctttgccggaaaactataatatttttacaaaatttaaaaaaaatatttgcagggtataaatattcgtcctatatttgcaccacttaaaacaaaggacattcctccttagctcagttggttagagcatctgactgttaatcagagggtcgctggttcgagcccagcaggaggagcaaaaagacttacagaaatgtaggtctttttttatgtggtctcatcaaagatttttttgcaattatcattaaatttaattatctgataaatagtcaaatagcttcaaaacacccattatcaaaggaaaaatttagatatttttaaaataaaaatttgtttgatattaatattcctgttatatttgcaccactaaaacaataggaaattcctccttagctcagttggttagagcatctgactgttaatcagagggtcgctggttcgagcccagcaggaggagccacaaaatgaaacacttacgaggatcgtaagtgtttttttattcctgttgcaagaatattgcaagaacttttcaaaatcataagtcattttaaactcgtaatattatttttaattaaatcaaatgactgttgatttcaaaaaccgtatccaaatccattgagtctaaataatgctgagtagttttagtgttggaatgggataacatttctgatattttatcaatagaaaccccacttctttttaaaactgacgcataggaatctcttgcggtcttgagtttcaaaggaacggaaagttctaatttttctgataattccgatagtgaataattaatctgttttctaagtttacgattataataatcaaagttctgctctgaatatccttcttttagaaaacccaatacaaatttactgtttctatcacctactttttgtagcaatagttccagcttcctgtcaataggaacaacaacatccttttttaaattttttcttgttttttcagtttttttcctgaaaaacacaaaacattttccattttgctgttcccacctcaatctcaataaatcggcaaagttgatcccattacaacggtaaagaagttcccaaatatttcttgcaaattcttcttcaggatttgcaaaatttttaaaatttacgatcttttcaatttctttatttgacaacacatattttttgggaatatattctgtaatcttatatccttctgctgaaaaaggataaacataatcttttggtattattttctttttattgcaaaagtaattgataaccgttctgagatcccgtaaattggaattaatggatgatatagacgttcctttcctaagtctctttttttcattagttactaaaaactctttgtcaatctcggtaatactaatcccggaatttcctctcaaaaaaacattccgggaatgctccatatgtttaatagttctaaaactcagatgctcattttctgaaatgtaccgtgtaaataagtctgatagttttaaagaggtaaaaatctgttcattttttaaatcagtatctttattgaaaaacttagttttaatcttattccggtcaaaaaaatcaagttcagatattattttttcagcttgagaaacccgtttaatgcattcatggcggaattctactgatttttcctccatattctttttatcaaaaatatgagaatactgtacctctgttagttttgcgatattgagatacaattgatttttaccttcaataatacggatgcttagattataattattatttttcagtttaactcttttgtcgagtacgagactacatgttgccatttttgaaaatatttaaatttaaaccactaaaaccggaattttcacttcttttttcatttttccgccttcatcaatccaacggtcaatctcctctttactgaatattagtttttttccaatttttttaaatggtatttgatttctgtttacttttgagtaaatcgttgcctttgtgaaagggatatattttattaatgaattgagatccatatatctgttttcttgcatagttttgatattattttgaaaacaaaggcatcgcaatgctaagcctttgttttgattttgccaaagcggcagttaaaaatttacgttttttcaatgtaaccatacccaaattcaagacatgacttattctgttcacaaaatctgtgaattaaaaaatttgataaaagtttagattaaattataggaaacggtaaataaaaatttcctgatggttattgaaaacctttaggcagcaagatcaatttgatcatctgaggaaagaaaatcttttctcaaagaagaatattcattttcatcatattcagaaacacccttttcaagaatttctgagattttggcaacgtttttttcatacagttcactgataatcactttacggttcagcatcaatgccgctcttcctgttgttccagttccgccgaagggatcccatacagtcccgttttcaggaaaaaatgataagataaatggaatgggtagcaaggttggaaacgacccgaaaaacccattctgaagaccatccttctgtgatctctcctttgagatatttaactttaaaatttgttcaatgtcgttatcacataggaaatttctcatcgttttatagggattagaaatatgatatgatttctttttgcccaaacctttgtttccctgttctgaacaaccacttttaacggttgctgatttttctggatcaaatattctcagttgatcgtagtaataatccggtgatttggaaaatataagaatagattcgtatgaatttgtaaaacgtgaagtttcgttactttggggcttaggatttgatttttgccagataatctgatcaataaaaaagaaaccagccttctgcatctctaaaatcaataacgcaacgacaccaacacaaattgaacctttataggtatcatggagattgataatgataacaccatcctcagtcatatgatctgcccctattttcataacatcaacaatattttctacgaaatcttcacgttttttctctcttccaatttccaactcagatcctatatctctacttcccttcgaaatattatcttttccatattctattaggttgaaataaggaattgaggtaaaaataccgttgatcaatgttccttccggaaactgagtatccagactgttaccgggaagtattaaatatctgtctgaagaaatatcatttaaaacagtgatttcagatgttcccctatcaactttagtattgtattgacgcatcattgactctgctttttttaagtcatagtttttactgatatatccttcaagaattttagcctcattttccttttggaggtcataattattttttggatctgctaaaatatcaagacatttttttgctctgtcgaatgatatttcattttctaaaagtcttgtagaaagattaagggcattctccggattttcgttatcgaagaccaatgatctttttgccgtaataacattatttcgtccccatcctctgccatattgttcagaaacgaatccatacttttcattacatgaaatttcatcctcttcattaccatctaccactctcaaatagtgagagagtaatcttctgcgttcctcaacagttggaaccgatttcagattaaattcaataatccaatctttgacttggtctttcgagttgggtgtcttttcaataattatacagtcgatttggtttaaatttaaatcctgtaacgctaaaaatcttaaaacaccatctacaatgacatatttatcgttatacctgaagacaaccagaggaatataacatcctgtcttctcaaactgttcctgtaattttttaatgaactgtttcttttctttcctgtcaaataactcatcccattcttccggaatttcaatttgatttaatgataatttggttactctgttaaataacggcaaaactacccctgctgtaaatgtttctttgtgcatgatattattgtttaaatattatgatgcaaagtaacaggggtcaccaaaaaatgtgaagacaaattacattacaaacctcgttttgtaacgttacaaaaatgacgattattttgttttgcctttctttaaaatgtatttctgatccattgatataatctccttttgaatattgattttatagtatttatcaacagaatcatcgaaagtattgatcatgtagaactccgctaatttctcaccgacagtctgattaatttccttattgatagaatttttttcttttaaaaatcttttatacccataatcgttttcaaataatttctttacgatttcatcaacctctttctgttttaaaactaaaatatgatctttaatctcctccttatctctattctttaaagactttgttggtggatattttatctgaacataaatttcagtcagatcttctttatattcgtctaatttatttgttagaataccatttaaatgattcagaaaaaggtaatataaagatttaggttggggacccagactgatcttatgttttcctatcgtaagtattcctttttcatccacacatatcggttcttttggaatctggtttagaattaaactaaaattatccaccatcgaattccgtatagaatctataattgatttcaaatggcttataacaacaatatcaatattttcactcaaaattctctgtacacacgagtcacagatatacccctgacgaagtttaaacatgatgtctttcttgttaccacaaaaatcattaatacaacctatggattccttatggatattaggttcagtataaatattatcgatatttaatttcattaaagactgaataatattctcgacaatttgaaaggctatcccatactttgaatctttatcagaaaaatattcccaatcgttagaatccacaaatatattatgaccgttaaaaccactgaaccaattctcatcatgtttatttggtgatattaatacagcataattatcggttgggattttattaataatcctgtacatattgaggatttcccaatactgtccgaaggataaacgtttttgcaaagaataatccttaatctgtagttgaagtatttcggtgggtattgtttctccctttataaattttaccgttccgggaacagtgttaagtaattttacaacttcattcagttcttcctttggacattgaggaagggcagtgacaataatattcatgctgaaaatttaaaccctaaatgtagcgactgtttggaaaataaacaagaaacgctaaaaactgctaaagtttattgtcttttttggtttttcaattttttgcggttatatttttattaagagtggttttccacttcataaactttccaaataaataaaaaatggaagaaaaaacatttaaatattctgtaagtaacagaatattcaacgaaaaaatagaggatggtttgtttaaaactatttataattcaatgattccgataaaatcaacaatagaagaattttcgaaactaattttaaagccagaggcacacagttggtgtggtggtacattttcaggattaataaatgataataactggattgactcttcgataattggaatggacttcgataaaggagaaataacactagatgaagtgtattataaattcaaagaatttgatattatcccaaatcttcattacgatacgttcagtagttcggaacatctgcataaattcagggtggttctcttttttgacacccccattacatgtaagagaatttatacaaagattttgattactttggaaaagttattctacacggatcctaactgtaaaaacccttctaggattttctatggtggtacgaatgttcatataactaataaaattcccctttctttagaatatttcatacaatttattgatataaatacaattgccagagataataatcttactagaggaattacagataccagttcaattgatgctaatttttgtaaacccttatattctaataataagaatgtacattttttagcatcacataataaattaaattgtacttctatagcaggggaaaaagtaattaattgggataaggcgtgcgaaaaaataaaaatattaaatgatttcaatagtggaaaatggttatatcatcaagaattatttgggttggcaaccaatttaatgtacgtgagaggaggattaaagaagatgaaatcaatcatgaataaatttaataagactggtaaaacagattataccaaaaataattttgccatattaccttatgtgaaacttaaaggatataatccgattccagttcataggttttcatcccatctggaagatcaggagattcatgatattataacagaagttcgcaatatccggggacatatcgaggtcataacaccggtagagaatataagtctcaaagaagcagaaaataaaatgatttcaaaattcaatgaggttatttcaagtgaagaaacctgtaaaacttatattttttcgttaccaaccgccattggtaaaacccggttacttgaaaatgtagaaaagtgtatcattgccttacctaccaaccatttgaaaaatgaaataaaggaaagaatgaaggttaattatacttactcaccggattcgattgagtttaaagactcttttctcaataaaaaaattgaatatttttataagatcggattaccaaaaaaatcaatgaaaatcatacggaatattgccgaaggaaaatatctttccaacaaggaagatgtacagttggcaatagattattgttctcaacttgatctgtgtgataatccagacataaccgttttatccacccataaaagaataattaattctgattgtcttttgcacaaaaccgtaattttcgatgaagatcctttaaatactttggttgagataaaaacaacttcaatcaaagatatagctggagtgcagtatttctacacccctttaaagtcagtagcaaatcatctttcagatattaaggaaggaatctatgaaacaccattctttaatatcgatcaggatgatttatttaaatttattgacgataaaagaatattggaaaccaatgtgtttgattttcttaacagtaaattcttcatcaaacatgagggttctattcattacattatgaaaaaggaattaccggaaaataaaaagaatattatcctatcagcaactattccaattgacttttataaaaaactgtatccaaatattgaatttgaatctgttgatataagaaatgtggaacaggttggaaaggtcatccaatataccggacgttcatgttcaagaagtggtctggaaagatatggggaaactgtaagtaaagaagttggggaacaaacagtaattacttttcaaagacttaaaggattatttaaaaatccaacccaagatatccatttcgggaactgttcaggatatgattatctcagtggtaaagatttggtggttgtaggaactccgcaccgtaataatatcgaatatttcctcctcgccaaacttatgggagtagaattcgattacttcaactcaccgttccgttatcaaaaaattgaatacaatggatttaaatttatgttcaatacatttgataatgaagatctccgaaatattcaactccagttaatagaatcagatttaatacaggcagttggaagagcaagaacactaagaaataaatgtacagcactggtttattcaggattacctttatcaatagcagacgagtttatcatcaaaaagaaatctgcatagtcatcaaaaaaactcaatttttaggcaaaaaaattgaaaaatttttatttttattttgggtatcaaaatattctaaaggtttttctccagtttaatattaaataacacttttctgaaattttagtgaaaaactggaaaaaaataattttgagatattatcccccctatcgaaccatagtaattaggaggagggaacggaggaaggatttaaggcaaggggggcagggggttatataatctacaatttgaaaggtgttaattcacacctttcttttatatatagtaattttgatacatccggaagatagaattgttttgctccacacaagcaaaataaattttctatccggagatcattcaattcatgtacaattgtaactatagatttctacaggacctgcactaaaaaatattttgctcttcagtttactgcagttaccggggaccttgagtgcttaattttattctgctctccaattgaaaaaaaccagactcaattcctgatcaacaatatttaattattattctttacaattctgcggtcttaaaatttaaaacaaaaactacatctgtttttaaacgctaaatagtgctaaaagcataggcagaacgtccatttcgccgtaaatttaatctgaaattaaaattacaacaaaaatgagggttaaatataatagagtttctactttaggtcagacaggaaatcgttttgaagcagatacggataaatatgatttggtattattagacaaagtttcaggcacagtaaattttagagaccgagagaacggacggatcttaattgatcttgcgggaaagagtcagataactgaaatagtggtcgaagaaatttcccgtttgggtcgtaatacaagaaacgtactcgaaacactcgagatctttgaggagcatgggattaatgtggtggtaagaaacatgggactacaatcccgacctaatggagagaaaaaccctatatggaaagtcataattacgataatctcaagtttgtatgagcaggaacttagtaacctaagggaaaggatcgccgccggaaaattaatcgcccttcagcgaaatgtgcgatttggccgtcccaccgggtctaatgaaagtgatgcaaccttcattaataaaccaaaaaataaaaaggcgttggaatatctgaaaaaaggaagaacattaagagagattggaaaactacttgaaatgtcaactaaaacagtacagaaagtaaaaaaagttgctgtaaaacttgatatgatgtaaatgtaagtaaggttaatccatccatttaaccttaaattttgaatttttcaaaaaaaactagcacttgcttgttaataggtacggtttttttcggtgcaaaataatattgttttttatataataattgaatgaacactgttatatgttcccagataaagatttttattttccggtttaaatttcaatcttttatgatttacggcaaaaatgtaccttaaaggtaccgaaaagtacatataaagtcttaataacttaacataaagtacactttcaactgattaattttgagttttgtatattttgctacaacatttacgaaaataaattttcactttaatgatagactaattatatttgctattgataagattaaataatcctatcaaatacatttcgaacacatagaacgcttgtctaacgacattcctcaggtaaatctggtacatttaattagggggaatatgttagcaactctcatgtcatatctatatggcgtgggggtctgctacttatttgaccctaacggtttaccagaacctacctgatagaataagtttagtagtcctcacgctttctttattaattaacaactctttttcgggactgaaaggaaataaaactttaactatgaaaaaagtttatttatctctattaacagtaatctttttaggttcatgttcaaacaatgattctgaaactacagaagaaaataaaaatcaatcacaacaatttatcggtaaatggcaccgttacaaaacggtaattctcaacggtaaaaccgacactcccctaagttcttacgatcatgctaaatgcgaaatagaagcaatacatgagtttacaacaaacagtaaatacttattgacaaattatgttttaaattcttccactcaacaatgtcaacaaatagggagtatagaaacatatccttattcttataatgctacaacaaatattttagatattgatggagaacgttattacattaaacatagtgattccaaggaattaattcttcaggattatgaatattatgatcaaaatggtgacggaacaaaggagaaaagattagattactataaaaaataaaccaccgaaaaccgaaattcatcatgaattatttaaactaccttgagaatcttgatttcgaatcaatgattacaacttcatttctattgcctttcttcgctataatggtggttgttaaaattctttccgcaataattttttctttcgtcccggatgattatgacgatgatccttatcaagttaccgtattttcgaatatacttttgtacttcattttctctttctttattgtaacagtatatgattataatgataggaaagggatattagatttccggtattctcaaaatgtatttgaggaaaattctaaagaattcgtagtgaaagaagatactaaattagaaaatgatcaaaacattaatattgaagatctaaattcttttgaaagtaaaacattttcttgggatgatatagtaattacacccgaagctgaaagactaatagataatgcaaacctaaccgagaaatatgtgggattatcatctgaggatattatcaaactaaaaaagataatgagtgacccgaatcccgatccactatctaaggctgaaaacaagatcgaggttggaagcactgaatgtaaatggtgtgaaaaaaagattgatatcaaagcgattatttatacttcaaaggatttgttaggggtaattgtaaaacctaagtctgaagacccttttgaaatgattgcttctgtaatgacggttttaacagttagtccccaagcctgcattgaaagttatgaactccaagatacaaatcaacataaatatcaatttattgtaaccgatgaaaaagaattttgttccttaaaatgtgagaaagaattcaaaaataacagaggatactaaaatttaaaataaacttatgaaaacattatcacttattggaattttgatcagtattttaggaattgtattgtgtttaggaattattgataattttgtcgcatacgggaacaaacttattgactatttaaatttaaaccacaaagaaattaaacacgaaattttctcgataacttccgttttagataccggtagaactatttgttttgttttaatgggtctttttgcattcaatctttttgtatgtactaaagtttaccgttccagaacttaagatatgtattccaaaaatattaatacaagtcaaaagaggctgtctcaaaagtaccctctctctcggactcctgtttgacaacttttatcatttaggagattctcagagcattagtttaccttttgggacagcctctttatttttttccgaattgtttcttggcagtccaatttcatgttcctgaggataaggctttctaaaagtcatacttacatcttctttaatttgacggtgaatatcatattgtttttctttatcgtaagaataccggggatcggtgatcattggcatctttgccattttatgaatagtaatggtaggaaagtgaaaatcaacttcaacccttccgagtaataaataacaaccgccttcctgaaaatcatattcctttaaactattgggaaaatgtgcggtgtcaaaataatcaccgttgacatcgatccaagttccaaaatacatcgtcccttttttagtgggaacgtgttttctggaaataagatatgctaacatttttacctgtcttttatgaaatttcaacaagtcttttacaaatactgatcctctgtatttggtttttaataaatcaaaaggactacatgaaactggaagtccaattaactcaatttcatcaaatgcatcctcgaaactttctcttttcagttgtggaagtttaaattcctgaacaggttcttcaattaacatcaaacccctattcttaggtttaaaatttattaatagtaatcttatttcaacaagcaattcattctttggtttacaagtaaaccagaatgctccaataaaaattagaaccttcatcggttccatcataatattaatccgtctgataaaatcttcttatgctttataatctccacaaattttcaatttccatagcaatatcatgagatacttgattcaaaatttccaaatctttatcacctcgatatatcatggaaatgaaagcatacatttcaatttcttttttaatccttgggataaatttacgacgcactcatctatgccaaaaataaaacaaactcataatcaatatattaaaaaataagtttaaatttgcacttctattaaaatcaagatgaaaaataagattgccttagttttaggattattcacaatagttactgtaaaatcacagaacacagtacgccccgcttccgaaatattttcagatttcaatggttattggagaagctccaacaatgcagtaatacccaataacaatcataatttacttgcctttacttggaatgcaaatggaattaataatattaacacacccataacttattctaccggagttaataattcggctttatccagcaataatattcctttcacatctgccacatttatttcattacccatttacacaatcccctctccaggtagcggaacttttattggggtaggacaagcatttggaggaaatggtaatgtaacgccggtgccggttaataataatttagtacaatatcttactgatggtattaacggtttaggtttaggaactgctatttttaatataccacaaggctctaacattgccttcaatacgatgggaattgttcccacatcaatcggagatggtgtaccggatcttatttttactcagatgggacaacccagcagtacatcagatgtatttcactttcaaaatggtcccaccccatcagatccgatggtaggaactccttattcggtagcttttggtgcagaagtaaatggtataccggtagttccgtctattggtaacgcctgctggaaattttacagagcaaatgtatcgcctcctctttatgatgcaggaacttcaagtggatgtacgagaaacattagagttatcgctttagattggtctgaaatgggaataacgaccgcaaattatcagagtgcaacaacattaattcaaacatattcaggaacatcagaccctgcttttattggtgcttataacgctgcatcaattacttttgcgtctacttttagcggaactgtctttaatgataacaatgcaggaactcctgatggtaacggatatcagggagcaactgttaagctctttaataatggagtagaaataggatcaaaaacaactgatgtaaacggatattattattttgacaatataaacatcaatacttatcccggtccttacacaattcagttaacagagccaacaggttttaatgttgtaggtaataaagtgggaactactgccaacagtttcacagcaacaatctctaacagcatttcttcagggaataattttggaatcaatcaacctcctgtagcggtagatgataatgcttctgttggtaaaaatatgtctaaaacattcagtatcgtaacgaatgattatgacttgaattcagggtctttaatatactctacaattaatctcatcgctccctctggtgcaaccaatattataacttccggaggatatacgaaaggatttataattgccggacaaggaacttggctggtagataatcttggaaatctaacatttacccccgctatcggattcttcggaaacgctactaccgttaattataatattaaagatttagccgggcttacaagcaataatgcctcaattttcatcgctgtagattactgcataaaaccaggagcgtcaggaattcctgatggatattcaaaagtaggaattactacattaaaaacccgtaacaaaaactggcccgaaggcccaacaatcaatgaaggaggtgttcccaatggttttattgcgttagaatctaatacaaaaggactggttattaccaaaactacaagtacagcaaatattattaatccccaaaaaggtatgatagcatatgatattacagatcaatgtataaaactttataacggaactacttggaaatgtataaaaagagcgtgtaacgattaaatataaaatatgaaaaatataaaaaatacaaaaacattctatataggcagtcttatattttgttctttaaccttatccgcccaggtagccattggtaaaacatcagtaaatggaaacagtacactgctggatttcgggggagcaacagctactaattctccgacagatgttgaaaccactaatttcaaaggcatcattctccctgcattaacagcaactcctacattttctgctaccactccaactactaataatccacaaaacggaacattcatatttgataaaacttcagtaaaagtgagaatgtttactaatggtagttgggtagatatgtcagatacgggaagtttaaccaatcttacatccaatacaagtgcagagagtgggaatggtgtgataataggttccaatataagttcggctacgggagtacttgttttagagtctcccaataaggcaattatattacctcacattaaaaatcctcatacaacagtaaaaagtccctatgctggtatgatgtgctatgatacagtaagcaattcgattgcggtatatgatggcagtaactggaactattggaaataaaaatctttaccaactctacgcctctgtttttgctttaataactgatagaagattttaacggagcacagaaaggattcacaaagatggaggtttcctgcggaacgtcgaagactattcgaaataccccgaacctattcacttttaggaaaatagcaacagtggcagcaaagcttaaatttaaacataatattctgaatataagaagtgattcaatatccttcaactccaccaaaataaaagggtataacaccatttaaaatctaaaaatattttataaattgctcaaattcattccgtttcattgattgcctttgtggtgattgaaatggtggtcacaaaatttaattattttttaaaacatattttcttaccgcgctcgacgagatcattacatccttcttgaattttctttacataaaaaaatgtacggaaattattgatgatgatgtgtacttacaaaccttctaagaatggagtcttgccggttttggcgggatataaattttaaaaaagttgcaagatttattgcaagacttttttagtaaatggtcatagaacatattaaatcatcaaagaaatgaaagtactatattttttcaatcatctcatattcagaaccttaaaatcaaaaacactatgactgttaatcagagggtcgctggttcgagcccagcaggaggagcagaaagacttacagaaatgtaggtcttttttatttatccttttttagtgcgatcaactgaaaaataattattttaaacatcgttatattttaacaaaacaataactataacaccgtcaaaacgatggtgttatttcattacatttgcagttttgtatttaaaccattaaaagtttaaataatatttatttttttataataaaagtgcatactttttgtttatgcaaatagcttgaagaaacaacaaatgttaattaataattccaaatattactccctctttctatttctattttttgcggatctcgtatactcacaaaattcggcaaacggcagaattgtagacgcaaaaaccaataaagaagtttccggagtggatattttcatcaatgaaaatgaaaaagctgctcttaccacaacttcgggaaacttttccgtacagtcggacagcgtgatttataaacttcggtttttaagaaaaaactattctttagaaagcatagatgtaactcctcaaaacgccaccaatatttttgtaaaactggctcaggaaaaagtaagcagcatacaggaagttgttatccacaacgaaaagccgaaatataaaaacaaaaaagaaaatcccgcttatgccattatgcagaaagtctgggaacgaaaaagaaataacggtttagataaattcgatacctatacttataaagaatacgagaaaattcagtttgatgccaacaatctggacagcgcatttatgaagaaaaaaatcttcaataagcttgaatttatttttgattataaagattctaccgcaagcggaaaaataggacttcctgttttcctcaatgaagcgatctacgaaaattacggtgaaaacagaccttccaaaagatcaaaaaggcttttgaccgctcagaaaacatcgggctttcaggataatcagatcattactttaacggcaaaaaacctttatcgcgatatcaatatttacgataatacgttaaattatttcgacatcggattcccaagtcccgttggagaaacagggttcagtacgtatgattataatttggttgataccatttccatgcggggagaaaatgcctttaaaatccgttatcagcccaaaagagcagaagttttagcatttcagggatacttatatattgataccgacagctatgccattttgggagcaaccctaaaatccacgcaaaagatcaacgtaaacttcatcaacggaatttctacagaactggaatatgacaatccagacgaaaatacttttctaccgagaaaatttgtgacggaaattgaaatgacgcctttttccaagaaaaaaacgtctaaaagcatcattgccaaaagatccgtcgattattcggaatatcagttcaacaaacctcttgaagataaaattttcaaaagaaccgaggaagaatatgatgataaattcgtagaaaaagacgatgcatattgggtaaaagccagaccagattctctctcaaaaagcgaacagggaatttatgacatgcttgataaacttcagcagaccccaaaattcaaccgtattgtgaaactttacgaaacattgggttcaggatattataacattaccaaaggaatagatttaggtccgattttctccgtttacggaaaaaatgatgttgaaggagaccgaatccgactcggagcaagaacttatttcacaagaaatgacccttggagagttcagttttacacggcttacggttttaaagaccaacaggtaaaatatggtgctgaaggaagattcatgtttaacagagtaaaccgttttacagtaggtgccggaacaagaagagacattctgcaattgggtgttcagcttacaaatgacgacggaattatggcaagaacgtttgcttcttcaacgcttttcgcaaggggagaaaatgcttctttaagctccgttaatcaaaccaacctgtttacgtctattgagccatggaaaaactttcagatcaggttagacggaaccatgcaaagcattaaatcggcaaatccagacggatttaatctgatgtattacaaaaacggagatctgagaaaaacaaccaacgattcgcattttactttaagtttaattgcaagaccgggggcaaaattctcccaaaccggaatcgatcgctatgaacacggaactttagcgccgactattgtcttaaaatacacaaggggaattgagggaatattcgggtcagattttaattataacaaactgcagttcatgttctataaacccgtcttaattggaagctggggaaaaacattaattaactttgaagccggaaagaacttcgatacagttccgttggctttgcagaacgtcattccggggaaccagtcgtacagtttggctcaaaatacgtttgcacagcttaattattatgaatttgttgcagacacttacacaacgctgcatttagagcatcattttaacggaaaaatcctttcttatattcctttgatcaagaaattgaaattaagagaaattgcgtttatcagaggagcttatggaacattaagcgatgcttcaaaagcaattaatgtggaaggattcaaatattctgctccaagcgaacacgtttattatgaatacggtttcggaattgaaaatatcggcttcggaaaccttagaattttcagggtagatttcaactggcgcggaaattacctcaacagaccggatatttcaactttcggaattaaagccggttttcaggtcggtttttaaaatacaaaactccttcagcgcgaaggagttttttttatttcttaagattcttcaccataacctttgcagctattgcaatgcgctacaatgtacacaattttacacggtggtctctgcccttccggaatgctgcaataaacatcacatggtaaacatccctgatccggagcagctcctcccattacatttttaagatcctgtcttttgattttttttaaatttttcatagtaatagattttataaagttgacaaaaagccccgacatgaggcttgagtttcagatttagcagtcacaaggcattacatcaataaccgaattaatacagtgttgtttttgccatgctgtccacgtacaccattcgtaacaccaatttgcgggaatcggacatctttctcctccagcaatggctttaagctgttttttcgttagtttttttagatttttcatattagtttggtttaatttgtcgcctactctgtttgcttttcggcttacgcaatatattaattatttgatagttaccaaatatataaatatttcccgttaaattgaataaatataaaaactttaacttttcctcatttcagtgcagaaaaaaagcctcagcaaaattgccaaggcttttaattttataaaacgctgaaattatgcgtttgcttctacagatacgaaagatctgttgtttgctttctttctgaaaactacttttccgtcaactaatgcgaacaaagtgtgatctttaccgatacccacgtttgcacctgggtggtgttgagtacctctttgtctaacgatgatgttacccgcaatagcatcttgaccaccgaaaatctttacacctaatcttttagagtgagattctctaccgtttttggaactaccaactcctttcttgtgtgccattttattttaaggttttttggtttaaaaaattattctgcgccttcagttacttcagcgtcagcttttttagttgtctttttagcaggtttttctgcttttttagctccttcaaatcctgtaataccagtaatctgaatttgagttaaagattgtctgtgaccatttttcactttgtaaccttttcttcttttctttttgaaaacgattactttatcagcttttacatgatccaggatctctgcttctacagtgattccgcttacagctggggcgcctaccgtgattgctccgtttacagtaagaagtactttatcaaaagatacttttcctcctttatctccttttaaacggtttacaaacaacttctggtcttgctcaactttgtattgaagccctgctatttctacaattgcaaacattgtttatagatttttagttatttcgaggtgcaaatataagaaatattttctaatctgttcaaattcaattcaatctttttttaaataaaattttaactatgttttgaataatttatcacaataaagtgatatgtatttccatttttatgtataccttcgttttcaccaaaatatatatatatatgaaaagaaaaatccaattcccgattcttttgggagccattgctgtactttctttgtcagcatgtaacgacgacaccatggaaacgcctgtacaaccggaacaacaggcagaaaacctgaaaccggaacagccgaatgctcttgaaaaagtttgttattacgtagatcagtactggagttcttcatctgtattgcttacttcactgcagaattctgcagacaccaactttatgaattcccagatgacaaaaattgccagtatgtgtggaagaagcaatccaaccttaaggtttgtgaatgatccctcaaattttaactctacctacaatgccatttcgtattctacaggaaaaatttattacggctatgccatatattatgatgcaaaagcaaaaggaggagatattgtaaacgcaatgatccttgcccatgagtacggtcaccagttacagtatattttcggacttcctacggtaacagaatccacagcaagaccaaatgaactggaagcagacggctttgcaggatattacctgagaagacccaacggctacaaccagacaagttttgcacagattgcagccgcttatgaatttgcacagagtatcggagattatcagactacaagtccgggacaccacggaactcccccgcagagaagatccgcagtccgtttaggatttttattaggacaatatagccttagtgcagcagattttgattacaacttcttctattattatcagggagttttaaacggaacctacaaaatggcaaaaaacagccagtatccggaacttgatgcttacatgaagcagtatcttgatgagctgaaacaaattcagaccggcgaaatttctgctgaagaatttaaaaacttaaagtaaatcatcatttttgaaatatctttctcgaagaggcaggaacattgtttctgtctctttttatttgtctgcatattcttaaagtttattacttttgaaagatcatatcaaaaaaaatgaacagagacctctatattgatttcgcaaaaggactggctaccatttccattatctttatccataccgctttctggtcgggacagttttatattcaaccagaagtaagggttttctctttagttttcgatgttgccctgttttatgccttaagtggaattacatccggttccaatatcgaaaaaacattatacagactgctgaaactgcagatcacgtatatgatttttgtaacgcttctgttctttctggattatttctttaaagttttcgggctcactttcttttctatggaatggctgcagaatttttattcaaccttcggatcgaagtacgccaccacaagtatttctaccactccgcaatgggaaaatttgggcaactggtatcttcaccaatacatcaatgcagacacttttccggtagttatgggaagcttctggtatttaaaagtctattatattttaacggtgttcggagttttaatattaaaattcttcccgaaacatgttaactggttcattggactttgtgccggattaactttattatttaatatttttccggaaatttatccttcgggacaggtaggatatgttgctttttacatgactgtattcctaattggtaacagaatgaaaggaaagaaaattccggacaggatgattcctgtattatacggattggttgcggttgcactggcaggactgttcgggttttacggacaggaaatattttacaaaatcaataaaaataaatttccgccacaaattccgtacattatctggactatcttctctttggtaacgctttttgttttttataaccggttaaagatcacaaaagaaaatgtggtgacctacattggtaaaaacgcgatatttttctatttcgcacaagggataagctcttcactggtttactttttagtcgttccaatgaagggaaatatgccttggtggattttaatgattttaatttatgggatcaatattattctggcattcatcatttcagccggcttgaaaaaagttgatgaatggggttggaatgttttagagtttttaagaagcaaaactgcgtcccgttaatctctgctttttccgcttcttgcaataagggcaacaatgacgattaaaaccaccgctcctataataatgtaagtaggattagtataccattcggtggttgtagttgtagtctgttctgttgttaccgttccgcctcctgttgcagtttcctgagcaaaactgaaagctgacattaataaaacaaacattgctgaaagtaaagctcctgctttagattttaaagttgtaatagtttccattgtttatatttttaattagtttcttagtgaaatcaaattaaataccaagatttttaaattattaagaaaaatatatttttacccttccgaatcattaaataaactttaatcgtatcgcaaattattttaattttacagaaaattttaaaacatgtttaagttgaaacttcctaccgatccaaggtgggcaaatattgcagaaggaaacattgaagaaattttaacggatcatgcgtggtgcgagcaaaaagcagctaccaatgccatcggattaattaccatgcttcccgaatatccggaaattgtaacggaacttcttgccatcgcacaggaagagctggagcattttcgtcaggttcatgaaattattaagaaaagagggtacagttttggacgcacccgaaaagacgattatgtgaatgaactagtaaattttatccagaaaggcggcaacagagatgatcttattgtcgataaaatgctttttgcagccatgatcgaagccagaagctgcgaaagatttaaagttctgactgaaaatattaaagatgaagagcttaaaaccttctacagagaactgatgatttcggaagccaaccattacaccaccttcatcgggtttgcaagacagctcggagacgaagaaaaagtaaacaaacgctgggaagaatggctggaatatgaagccaaagtcattcagtcttacggaaaaggcgaaaccatccacggataaaaaaaagatacattgaaaaaactgacgtttgaaaatattgccaattttttcctgaaaaatttctttcagggactcgtgattatcggtccgatcgggctgacaatttttgttatctggcatgttgtaacgtctattgataatattattccttccgttgcaaaagaaattcccgggcttgtttttatttcaaccattttaattacggcacttcttgggtttttaggaaacaaatttgtggtcggaaagttctttttcgattctatggaccgtcttcttgaaaaaactccgggcgtaaaacatatttatactccaacaaaagatgtaatgtcctcttttgttggagacaaaaaaaaattcaacgatcctgtctgggtaaaaaccaacgaaaatcctgaaatatggagaattggctttttaacacaaaaagaaatggcagacgttgaaaaacacaactatgtagcggtatacctccctcattcttatgctatttcgggctgggtaatcgttaccgaagaaaaaaacattaaacccgttgtagggatgacagcggcttcggcaatgaaatttgcggtaagcggcggtgttgcaggattccattccgatgataatattttcaaggctccggaatagtctatctttttttacttaaaaatatcgcaaaagatattctgaaagatcattttctttatctgattgaattacaagattaaagaaaacattatcctgttcattaaagaatacatctgatttttagaataaaattttttcgcagattattcatttttaatgaaaattttacaaattaaaacaaaactaacaacaataaaaaagatgggcaaagttgcaatcataggagccggtgtatccggtctgagtatggcaaattatttggaaaaaaataatatcgactatcatctctacgaaagaagaaccccaaatgatctgaaaggacacggatttatccttcccaaagaaggaattgaacatctttcagccattattgatattaatgacctttacgcaaaaggaagttttctgaaaaaatacatccattataaccaaagcggagaaattctttccgaaaaagatctggatgatgtttttgtagtttccagaagcgccctgatcgagattcttgccaaaggaattccttcagataaaatttcttacaattcaacggttgcgctgaacggattttcggagggaaaagcagaaattacactggacgaaaatactattctggaagcagatgtggttgttgcttcagacggatcaagaagccgcatcagaagaactatttttcaggatgaaatcatgaaagccgttctggaaaatgaagtggtaaacatcattgaaaacgaggaactggcaggcaaaatcgaaagcaattttctgaaattccatcatgaaaacggcggacttacttttggcgttttaaaactttcatcctcaaaaatactttggtactgccagtttgatatcaccaaacatttcatcaacgaagattacactccggattgcatcaagcagtttatgttggataattttggcaactggaatcctctgatttcatccattatcgaaggttctagctatgaaaatgcacacatctggagagtttatgagcttgaaaaattaaatcctttttatcatcaaaatgttgttttcatcggtgatgcagcacatccattaattccttttacaagtcagggcgttacctcagcgttgaaagactctttcactttaacccaacttttagccgaaggaaatgatcttcaggaaacgttcagcaaatacgaagaagaccggaaatctgaaatcgaaatccacatcaaaaacggaagagccctgctggaacaattccttttacctctgaacgaacagcctaaaaacaccttaccaatttcatacaaataaaatgtttacaaacaacgatatcaattttgaagcgctgaaaagaaaagcctacaacggaagatgggcaactctggaagaagtaattattcctttaacagcagcagatccggacttcagaatgtctaaagaaatagaaaacggaattatagaatatattaaggacggctatttgagttatggcccattctccggacttcctgagttcaaaaaaagtgttgcagagcattttaacaccagtaaaaaaggcagctatacaccagaaaatgtgctggctgtaaacagtgccgcgatgggaatgtatatggttgccaaatatgtgctgaatccgggagacgaagctattattttcgatccggtagatttccttttcaaaaagacagtggattcggttggcggaaacattaaattgtgcgcggtagattctaaaaccggagatatcgactttgaaatgttggtctctttaatttctccgaaaacaaaactgatcagcatttgtaatcctcacaatccagtcggaagaatatattccagagaaattttacagaagattgcagacattgcggcagctcatgatctttgggtaatgagcgatgaaatctggagcgatattgtctatgataaaaaagaattcaacacctactcttctgtttccgagaatgctaaaaagaaaagttttaccgttttcgggttttcaaaatcgtttggaattgcaggattgagaattggtgcggttttatgcaacgatcaggaattactggatgatttcacagaaaaatccatgttcaattctaccattgaaggcgtttctacgttgtcgcagattgcagcaagcgttgcaattgataaagcgaaaccttggtttaatgattttcttacgcatttacagcacaacagagatttagcccacagtatgctgagcaattcgggcgttctaattcctaatcttcccgaagccacttttgttatttttcctaaaatcaacaacggtatgtcgagtgacgaatttgcacagcacgttttaaaagaaggaaaagtagcgattgttcccggctcggaacgatggttcgggaaaggcgctgaaggacacgtaaggatctgtttttcaacctcacaggaaatcctcaccgaaggactgaacagaataatcaatagtttttaaaaaatataaaagcggattcaaaaaattttgaatccgctttttattaaaaaaatattcagaaattaatttttttcttaaaattatacaggataatatttctacataatcactgtttttatttaatttaaatatatttattaaacaaattcatattttattaacgatttaaaaataaaaattaatatttttgatataattgccaatttaaatctaatacaatatgaaaattaaatacataagtgcattttttcttggagcatcttccgttctgtattctcaacagattaatgacaccatatcaaaagaaggaaaaattgatgaggttgccattacaggaagccggaataaaaaaagaacagttgtagacactccggttccgattgacatcatcgacattaagcaggtaagccagtcaacagggcagattgaagtcaaccagcttttacagttttcagcaccttcattcaattccaataaacaatccggatcagacggagcggatgcagtagatcctgcaacattaagaggacttggtcccgatcagactttgcttttgctcaacggaaaaagataccatcagtcttcattaatcaatctttttggtacaaaaggccgtggaaatacaggatcggatatgaatacgattcctgtaggtgcgataaaaagaattgaagttcttcgtgacggagcatcggcgcaatatggttcggatgcgattgcaggagtaatcaacgttattttaaatgaccgtaatcatggttttgaaggcaatgctttttatggagtgaatctttttaaaagtccgggagataaagatgtggtttctgaccgaaaaatagacggaaatacttttgatttctatggaaactacggaacaaaaataggttctaaaggcggtttcggaaattttacggcagaatttgtcaataaagaatatgccatccgtaatgccaatcctgaaaaatatgatgctccgagacaaagattcggggatgcaaaatcacagaatttttattttttcggaaatattgagattccaatatccgataatttaaaattttattccagacagggcttttcgcacagaaatacagacgcttatgcatggacaagaagcgcggatgcagacggaaatattccgcaggtttatcctaatggcttcaatcccgttcaggatacaagcatttcagattttacctttgataatggtttaaaatttaaagtggcagactgggaagtggatgcgtataatgcgtttggaagcaacagatttacctatcagatcgatcataccatcaatgcgacattaggcctaaaatcacctacgagttttgatgcaggaggacattctctattgcagaatacaacaggtttcaatgcaaccagacaaatttctgttctggaagggctgaatgtggcattcggttcagaattcagatatgaaaaattcaatatcatcaaaggagaagaagcttcttacgctatgtatgatgtgaatggaaatgtcgtgacggcaagtactccttcaacattattggtaatcaatcctttaagtggagatgtaagaccgggcggttctcagggttttcccggatattctcaggaaattaacaagtccagaaataattttgcagcgtatgtagatactgaactcgatattaccaaaaactggatggtaagcgttgccggaagattcgaaaattataatgattttggaagcacactgaacggaaaactggcaacacgatacaaaataacgccacagtttgcattccgaggatctttttctaccggcttcagagcgccgtccctggctcagaaatattacagcctgcagtttacgaattttcagggaggaagtctggttaccattcaattggcgtctaatgacagtaatctggcaaaagcagtcggaattccgcagctcaaacaggagacttctgtgaatggaagcgcaggattcacttttaacaccggaaaatttacagcaacagttgacgggtattatatcaaggtaaaagacagaattgttttaacaggaaatttctcgcaggatgatgatgcgatcggaaatattttaattgaaaaccgtatcgatcaggctcagtttttcaccaatgcaatagacacgagaactaaaggggttgatgtgattttaagttttaacgaaaatatcggaaaaggaaaactgacggcaacattagccggaaactataatgaaatggagatcacaaaagtgaacacttccgacaggctgaaaggaaaagaagatatttatctcagtccgagagaaagagcttttattttagcttccgctccgaaaacgaagatcaatttaaacctgaattataagatcagtaaattcaatgctaatgtacagctggttagatttgataaagtgactctggtaggctataacggaccggacgattaccagacttacaatccgaaagtaaccacggatctttctttcggctacgaattttcaaaaaatattaatctgacgatcggaagtaaaaatctcttcaaccgatatcctacattgcaaaaagaggcggcttcagccggaaatacagaatcgggaggtatttttgatcctgtacagatgggatttgcaggaagacaggcttttgcaagatttaatttcaaattttaatctgcataaaaatgcattaaacttttatttaaccactgttgacaaaaggcttctgaattcaggagcctttatttttttcagaaaaccaatcttttgactcttaaaatttttaaatattgatttgataactttcgctttaccaatgcattctactattaaaataattgataaaatttatttaaactatttcagaattaaccacaaaaggcacaaaagaaaatgttaaaataaatttctataataaccaaaacgctcaaaaggaataaaaatcaaagatttttaaaaactattgtgatctttttgatttataactgttgactataaatagaagtttagttcatcttttgtgacttttgcggttaaacaaaagccttaaccgccttacattcaataatttaaaataattaaagaactttaaatcaaaaaattatattacaaaatttgtttgtttaaatttttattctacatttgtagagacaaataacaatccttagaatatgaaagaaataaaactgaccgattctgagaaagatctcatggaaattctttgggaaaaagaaaaagttttcatgaaggacattttagaatcctaccctgaaccaaaaccagccactacaactattgccacccttctgaaaagaatgcaaaataaggattttgttggctacaaattgtatggaaattcccgcgaatattatccaaagatcgcgaaaggagcctatttcaaagaagaaatgacttctatgattgaccgttttttcaacagttccgtaacgcagtttgcatcgttttttacgtccaatgcaaagctttctcaaaaacagctgaaagaactccgtgaaattatcgaccagcaaatcgacgaaaaatgatgatcgttttaaaaataattctgtgttcttccttgcttttgaccgtatattacgtgtttttgcagaaggagaaaatgtatggtttcaacagattttaccttttgttttcccttctattttcttacaccgttccattcatttccattcaatcggaaattcaaagccctgttaatcgtttgcagaaaacgattgaagcaacacagcaggttatggacattacgccgaaacaggaaagttttaactggatgaatctgatttggattttgtacggaatcgtaacattgattttcctgataagaactattatttcatatttaaaaattaaaaatctgaagggtgaaaaaatgatctatcagaatcaaaatatcattatcgccaatgaacctatttcgcctttcagcttttggaatacaatttatttagggaaaaactatctgattgacaacaaaatagattccagaatatttcttcacgaaaagagtcatctggaacagaaacacagcattgatattattattgttgaaatcataaaggcttttacgtggttcaatccgtctgtgtatttctacaaaaaagcaatgattaccaatcatgaatttctggcggacgaatctgtcttaaaaaatgattttaccataaaagactatcagaatttaattctggaagaaattatttcaagccaaaactataaccttacgcatacattcaatttcaaaaacaccaaaaaacgatttattatgatgaacaccaaaaaatctaagctggcagacttaaaaaaagtaatcagcattcctgttttaatgattgctttcggactgtttgtgcagagaacctatgcaactccaatcgaaaagatgatcgaaaaaacacaggaaacaatatcagaaccagtgaaagatcagatcattgaaaataatgaagaaaatagtaatgttttcaaaaatgatgctttacataacgaaactgagaacgttgcagaacttttaaaaaaagcaaatactgaaaaagaagttcaggataccatccgaccgaaagagggtaaaaacatggcaacaaaagatgaggcaactttacttccgcaatatccgggaggaattaatgaaatgaggaataaaatggcgaaagcatttgacgcgtctaaaatgaatctaggcaaagaaacgtatagaactgagattaactatactgttctggaagacggaaatattgcggatgtgaaagcatcaggaaacaatgaagcatttaatgcagaagcagtaatttctttcaaaaaagccaatgaaaacatcgtctggaaacccgcagaaaaagatggaaaacctgttcgttacagcatgagaattccgctaattatgtctttccaaaattaggattgattttttaaaataaaaacagcattcagattgggtgctgtttttgtttacataaagtctttcgtctattttaatgaatctgtggtatgaaatacttcccaatgtcaaatatatctttcgtatttttgttaggataacatcacaaattttatgaattttaaacttcaatcagaatataaaccgaccggagatcagccacaagcgatagaaaagctcaccgaaggaatcgaaatcggggaaaaataccaaacgcttttaggagttaccggatccggaaaaacatttaccgttgccaatgtggtgcagaatgtacagaaaccgactttggttttagctcacaacaaaactttagcggcacagcttttcatggagtttaaagaattctttcctgaaaatgccgttgaatattttgtaagttactacgattattatcaacccgaagcttacatcgccacaaccggaacttacattgaaaaagacctgagtatcaacgaagaagttgaaaaattaaggctttccgcaaccgcgagtttactttccggaagacgggacgtcctgattgttgcttccgtatcatgtatttacggtatcggaaacccgacagaatttcacaaatctttaatttccattgcgattggtgaaaaagtgaccagaaccgcacttcttcattctttagttaatgcactatattccagaacattaaatgaactccaaagaggtacattccgtgtaaagggagatgtgattgatgttttcccggcttatgcggataacgcaatcagaattcagtttttcggggatgaaattgaaaaaatccagagctttgatccggtttcgggaaatgtgacaggagcttttgaccaaattcagatttatcctgccaatctttttgtaacatcaaaagaaactttgaacggcgcgatccgcgatattcaggatgatctggtaaagcaggttgactttttcaattcggttgaaaaaccactggaagccaaaagattacaagaaagaaccgaactcgatttggagatgattaaagagctgggttactgttccggaatcgaaaattattcaagatacctcgacggaagattaccgggaacaagacctttctgtttattggattatttccctaaagattatttgatggtaattgacgagagccacgttacagttcctcaggttcacgccatgtacggaggcgaccgcagccgtaaagaagctttggtggaatacggattcaggcttcctgccgcaatggataaccgtcctttgaaatttgaagaatttgaagccattcagaatcaggtaatctatgtttccgcaactccggcagattatgaactggaaaaaacaggcggtgcttatattgagcagattatccgtccgaccggacttttagaccctattattgaaatccgtcctacccagaatcagattgatgatttaatggaggaaatccagaaaagagcggatcttgatgaaagggttctggtaacgactttaaccaagaaaatggcggaagaattaacaaagtatttcaccaaattcgggatcagaacacggtacatccattccgatgtagaaactttggaacgtatccagattatgcaggatctgcgtgtgggactttttgatgttttaatcggggtaaatttattgcgagaaggtctggatttaccggaagtatctttagtagccatcctcgatgctgataaagaagggatgttgagaagccgaagatcgatgatccaaaccgttggtcgtgccgcgagaaaccttaacggaagagccattatgtatgccgataagatcacaaaatcgatgcaggcaacgcttgatgagactgaataccgacgtgcaaaacaaatgcagtacaacgaagaacacggcaaagttccggtagctttaaataagaagatttctgaaagcctcgtgggaagaagcaaagattttccggatgaaaaatatacccaaaaagaaattttacagaaagttgctgaagccaaagcaagctacacttctgaagacatggaaaaagtaatcgcgcaaaaacagaaggaaatggaagctgctgcgaaaaatcttgattttattaaagccgcgaaattaagggatgaaattgcagctttgaaggagtaataaaggataataaaagtttcggcggcatcttcgatgccgccgaaactttatgctaaaatttatatgttttcgttttaggcttttcaaaattcatacttcctccccgaattggagtcagcaaatccattaagccgtttaattttatttcgtaaactgttgataactgcattcccagttttcctttgggcattcctgtcctggcaaaccattccagatagcttatcggcagatccgcgagaaccgttccttggtatttcccgaaaggcatttttacgacacagatctcttttaaaatttcagggtttattccatcttccatcttataccattaaatcgattttatcctccagagcgttgtcatttcccggaagcttaagttcaggagtatcatcatccgaaaactcgtttctgtatacctgaatcagaagcaaagttaatgaaattaaaataggaccgaaaaccaaccccataaaaccgaataaattcattcccataataatcccgaaaaccgtatttaaagggtgaatatcttccaactttttgagaagggtaaaacgcagcacattatccgttaatcctaccacaataaggcaataagctgccaacccaagtcccgctccggtatttccttccgcaatcatataaacgcagacaggaacataaacaattgcggctcccacaacgggaatcatagaagctgccgccgttaatgcaaaaagcaaaaccgcacttggcgcaccaaaaatgaagtatcccactaaagcaacaactccctgtccgagagccacaacgggaattccgatggcgtttgccataatcagctttctcattttttctccgatcatagatacattcgatcttttcaaaggcgctgaagaggatagaattctctcgaataaacgaggttttgccaacataaaataaagaataaaatacaccgacattactacggtgagtgtatttacggttccgcttagtgctttggtagaaaactgtcctacactgcttttcagcttatccatattttctttacttaagatatcaaatcctactttatcgaaaatataagtatgaattttttccagaaatacattaaacttatccatgtaagcctgcgcatttcctaatttttcaattaaaagatctcctataaaataaatcgggaggatgagaattataagactggcaaacatcaaggttaatgaggcaagccagggtttccattttttttcttcctgaaggtaaaaattatattttcggcaaacgacataaatggtgattgctcccaatacggaagggataaaaagagcaagattataacagattaatgccgccaatattaaaataattgccaacagaaatacctgctttatttttacactgcttatttgttcatttttattcattagttgtttattatttgtcttggttttcctaaatgggcacagtaagtagaatacatgacgatcatgataaaaggaaaagtagctataatgccgatacagcaaagaacaattccgcttatactaattaatccgcccaacagacctgcacctaaaaacgtaccgtaattttctttcgcgatgttaaaagtcttactgattgcatctattgcatttgcattctcaaacaaaagtataggataacctaaaagaaaaagtggataaacaaacaagaacggaatcccgcacagtgctgcggaaataccaaaaataattgtagtgcataagcagtacagaaggatatttcctaaattttggcgatacccgataaaaagatcagaaaattctatcgcatttttagtattaaacttattggctatatagattagtcctacgtaaataggagaaaacagaatgccaaaaacacttgaaacagaataatacaaagaagctcccggtcgggttaaataattatattgagaaaaatctccatcctcaatatcgctgaaaccgctaaagccttcccaggaattataacctgtaacagactgtaatacaaaatcgccaattacataaacaatcatcgcagcgatcgcataaagaaaaattcctttatagatttcgaaagcatgagaaataatagatcctgtattcctttccggaacagaaccctgctgatcaaattcatcaaattctgacatggtgtgattttttaatgttgttactaccaaattaatctttttttagcagaaactatattaaaatcacttcaaatttattccttttcggagaaaatggttttgtaaagcgaataaatcatcgcattccagaaaggaaatgtgaacaaacctcctacaaaaaataaagtaaatcctatgtatttaaaaattaccgcaaccatcacacacacaaatatttccagaaaatacatcttcagagctttaaaatttaaagaaatagattcgaagatggttcggttcatgaaaaacatcatcggtgctacaaaaatcgtaatgcaaacccagataacaggcaaaattaaggtattgaagatcatggcatagatcaaaaaccaaaacagaccatacgaaatatatctgaaaaagtttgttccgttgtaacccgccagtaaatcaccgatctcgattttttcttttaaatcaatctttcggaaaatctgaaaaaacccaagatttaaagggtaaaggaaaaccagtgttcccagtaaagcatagctgaaataccgagaattatccgtttgtccaagttccgccgcttttgccagataagcatccatcccgttttgataggcttcgataagttgctgttgctgctccaataccccgaatttttctgcaaagaaaaacattgaggtgaaaaatatggcaaagtaaagtaccgaaaacatcagctgaaaaatcagcgtcttattccagtagaaaaatgcctgcttcagtataaaatctaatcccggtttctgtggatatttgttttccattaaaaaaattttgtgcaaaagtaaacatcaataattacttttgcggaatgttttcggcgaatcatcaaaaatttacagaaatggatgaactttcactacagaaagttccctacttttttatcattgattttcttacggagaatgttgaaatctttaaagaatacgaaattgaaaaatcgggtttattaattgatttccaaaccttttcaaccgtaaaaacaaaacatattttagataaaaaagtagaatggatttcttatcctgaaacgttggaaagctttaaaacagggtttgataaagttcagaaaaatattcgcttcggaaattcttatctggtaaattatacccgaaaaactaaaattgagacgaatttaacactaaaagaaatattttatcattcttcggcgaaatataaagttttttataaagattttttcgtatttttttctcctgaaacttttttaaagatcaacgacggaaaaattttcacctatcccatgaaaggcactattgacgcctctctggataatgcagcggaaattcttaaaaatgacaaaaaagagaaagccgaacattacacggtggtagatctgctccgaaacgatctgagcatggtggcagacgatgtgaaagttgacaaatttcagtacatcgatttcatcaaaacaaagcaaaaagatttatatgccatgagttccgaaatttcaggaaacatcaaacctgaatttaatggaaaactgggaagcatcatgaaaaaactgcttcctgcaggttctattttgggagctccgaaacctaaaacactggaaattattctggatgcagaaggttatgaaagaggatattatacaggagtttgcggttggtttgacggaaaaaatgtcgacagttgtgtgatgatccgttttattgaaaaagaaggagaagagcttttctttaaaagcggaggcggaattacacacatgagcaggttagaagacgaatatcaggaaatgaaaaacaaaatctatgtcccaattcattgaaagcattaaagtagaagatcaggaaatttttttattggaatttcatcaaaagcgtgtagaccagactttcgcccattttggaaaggaaggtaccatagatattgccaagatttataaacatcttgagcatgatgaggacggacttttcaagctgagaatcgtgtatgatttcgataagaaaatccgcactcagatgattccttatgcgattcctgaaattgacgattttcagctggtagaaaacaacagctacgattattcttttaaatttgaagaccggaaagagctcgaaaaaatgaagatgaaatccaaagccgaagaaatcatcatcgttaaaaacaatcacattacagacacctcctactccaaccttttatttttaaaaggaaaagactggtttactccttcaacgtatcttctgaatggtgtacagagacaaaatcttttaaaacataaaaaagtaaaagaaaccgagatcactttacagaacattaagcaattttctcatttccaaatcattaacgcgatgaatgattttgacgaaaacttcacctatcctttggacagaattatcaatctgccgggaaatgaagaatatctggatctttaattttctttcagaaagttaaaatacgatttttgtatatctgcattatgcaaagcctgcgtattgatttccaatattttaggctgaacatccggtttaaagaaattttcaagaacacggtctaaagttacctcttcatctactcttgtgtaggagaatccgaaatgtttggctaaatattccgcgtttttatggtgttttgtggcgataaattcgtctaacgtattcggattggcatttcccggtcccggaataattttgaagatatttccttcgccattattgaaaatcatgattcttacaaacggaggaatgtactgattccaaagtccgttaatgtcatagaaaaaacttaaatctccggtaatcaacaaagtaggattagaatttttgattgcaaatcccattgccgtagaagtggaaccatcgattccgctagttcctctgttgcagtaaattcttcttttgccgtaatcgaaaagctgtgcatagcgtattgccgagctgttgctgaaatgaatattgtaattttcaggaacaatctgtgccgttttattgaaaaaataaaaatctgaaaaatctacggaatttaagaacttttcatgttttgcatcttttttatctcttaaaacatcccaaaggttaaaataaggtttaggctcgagattaacgaatttcaataatttagaaaagaaaatttccggctttacctcgatcttttcggtcagagcaaaataggtatcgggttgccagacaggatcaagatgccaatgttgtttgggttttgcttttcttaaaaactgtttcacctttttggaaacaacattctgtcccactgtaatcagcaaatccggtgcatacattttaaaatcttcttccgtgaaattgaaaacgtaccggtctatatgcctgaaaaatttttcatggtataaatttgaattcgcttcgctcaaaaccacaaccgtatgatttttaaccaattgcgttaactgattttctaattccggactgtgatctttggttcccacaagaatcatgattctttgcgaagtattccagtctgcaataaggttagaaggaatttcatattctttctgtttgattgttttttcaaccgtcgggaaagtcggtaattctgaaattaattcatataaaggttcttcaagaggaatattgatgtgaaccggaccttgtttttcaatacaaagttcaatggcttttttaatgatatcaaaattaatgtcttccgcattttcctttccatcttccaaaagctgaaaatctccgtaagaatgctgatgaaaaagattattctgacgaatcgtctgtccgtcgaaaatatccacataatccgttggtctgtcagcagttaacaccaaaagcggaatattggaataaaaagcttcggtgatcgccggataataatttacggaagctgaaccgcttgtacaggtaactgcaacaggttttttttcgctcattgccattcccattcctacaaaagccgcacttctttcgtccacaatactgtaacagttgaaactgtcgatctctgaaaaatgaatcgccaaaggtgcatttctggatcccggggaaacaatgatatctgaaattccgtattgctgaagaaggtgtgcaagtatctgaatacttcttttggaagaatattttttcataatacaaatttaatttataaatgcgtaacacgaaatagtttttaatttaaaaatctgtaatttagcagttcgtaaatttctaaaaatggataaaatacctagtgtagacctgcgtgatttcctttcgggcgacccggaacgcaaacagaaatttgtaaatgaaatcggaaaagcttatgaagaaattggttttgtagccttaaaaggccattttcttgatgacaaattggtggatgaactgtatggagaggtaagaaacttttttgaattgccaacggaaacgaaacagaagtatgagattccgggaattggcggacaaagaggctatgtaggattcggtaaggagactgcaaaaggcttcaaaaaaggagacttgaaagagttttggcatttcggacaatatgtgtctgatgattcccaatacaaaagcgagtatccggacaatgtaatcgttgaagaacttccaaaattcaacgaagtagggaaagaagctttccaaatgttggaaaaaacaggacagtatgttctgagagctttagcgctttatcttggtcttgatgaattttattttgatgataaaattgcagaagggaactctattttaagacccattcattatcctccgatcacggaagagccgaacgatgcagtaagagctgcagctcacggagatattaatcttattacccttttgatgggttctcagggaaaaggtcttcaggttcagaatcacaaaggagaatggattgatgcgattgcagaaccggatgaactgatgattaacgttggagatatgctttcgagacataccaacaataaactgaagtctacgattcacagagtggtaaatccgccaagagaattgtggggaacttcaagatattcaattcctttctttatgcatcccgtgagttcaatgtcactgaatgctttggaaaactgtgtagacgaaaacaaccctaaattgtatgaagacacaacagcaggagaatttttacacgaaagattaattgaattaggattaattaaaaaataaatacagaccgggtaatttgcccggtttttttatgcctttcagacagcaagaaatgattacataatataagaaaggaaggtaataaacaccttcccttttcttactttataatctttattatcctgtaatacagtagaattcagggcatggagtagattgtgtaaaagtaccccacggacagatacaggtataaacatctccgccgccgccgggatttcccggatctcctcccggatcttggtacggcacacattttccgccggagcatatttcattggctccacagccgcctgaaccgggacctcctccctcaatgcaatacgcaggaccgtagcctgcagaaattctttttttgtcttctcttgaaagctttttaaaatttttcatagttttttgattttgatgtactcctactctgtcagcttttcggaaaccgctttattatgataagtatttaactataaaattctaaaaatattattcaccaatatatgaaaattcattcatattttatttccattgaaaaattaattaaaatatcccacaatagtttgatttattaaaattttgattatctttacattagtatcaaatttttaactaaaacaatatgaaaaatttaaaaaaactaagcaaaagccaattaaagggaattaaaggagcaggaggaattaagtcttttccagatgaaccggatttttgtatgtatgtttgcggagacatcgttgtatgcgctgcatgcagcaaagatttcgaatgtcctgtaacggatatgtagactgcaaaaagttataaagaaaccgttccttttggagcggtttttatttttgttaaactgttaatcaaacaacctcagctgctgatcttttgctcccgtaaaacctttaatagaaagtttcggaaattcttttccatcgaaaaacttttttcgccctattttaaaggtgttatgaatcatttctgcaatatttccctcccctttctgtctgtcgaagaactttttctcacctaattttccgccccgcatagaacggatgagatttaaaactttctgagcacggtccggaaatgcattttcaatccagttcacaaaaaccggctctacagaatcatttaatcttaccaaagtgtaaccgaaactttgcgctcctgcttcagagattgcttttaaaatggttaaaggttcatcgctgtttaatccgggaataatcggcgcgaccataacattgacaggaattttatgttcagacagaatttctatcgctttcaatttgtttttggctgtgctggttctgggctccatctttcttcgaagttcctcattgatggtgggaatgcttaatgaaacggacacaagattctgttcggataaaggctgcagaatatcgatatcgcgaagaaccaaagcgttttttgtaagaacatgaaccggatgtctgtaatccagacagacctgcagtatttttctggtaatctcaaactgcctttctgcgggttgataacagtctgtatttccggaaagtaaaattggagctggtcgatatccttttttctggaaaaatttttctaaaagttcgggtgcatttttcttcaccatgatcttcctttcaaaatcaattcctgcactgtatccccaatattcatgagtaggtcttgcaaagcagtaggaacagccgtgttcacagccctgataaggattcatggaatattccatcggaagatcatcgctttttacctgattaacgatgcttttaggaaaaacttcagtaaaggaagtttttacggtttcaaactcatcatcttcaggctcaaaggtataccggtcgaaacgattgtttacatttcgctgtgcgccctgaccttttatggtattttcgttcttcattgatgatgtaaaattagagtggaatgatgataaaaaaatgaattttaacattaaagttttccacaagaaaaatccgaaactttaaaagctccggattttagcatgattggatatattttttaactacttcagtgcataaaattctacgccatgatattcatcgtcatagtttttgtcttcgaaatgtctgtgataatccgaataggcatcactgtattttttatcttttctgtgtaatattttttttattcctatgatacttaatactgccaaaagaccaactcctcctgccagtaaaactccgacttcttttttcatattctgtctgatttatatattctcgttattgcaaaaagtatacccaaacattttctgtcacgataaattttgttaacagatattgaaaaaatttaaaaatataatctttgccaataccacaacaaagcgatcaatggtttaattattgtagtttaaaacaaaaatattattatggaaaatacagacaatattgataaaatgacaaccttaagtcaggtaatggcaaaattggcacaaagaggagtacaccgtgagttcagaatgaatgaacagtgcgaaatgaagtttgaaaattcagaaaaggtgtatcagccttcagaattaacggttctgaaaacgtaccgttttgagggagacagcaatcctgatgataatgcagtgctttatctggtaaaagatacggcaggaaacatgggaatgatcatcgactcttacggagcagacagcaattatcccggcgaagaattcgatcagtttttaagagccatcaccattgatgaaagcgacgattacaatttctaaatttaaatatgataaaaatccggaacttattcagtcccggatttttcttttttcttaaatatgcctttcaagaaacctttcttctcagtttcttttttgggctgctcttctttattctgatcgggcttattctttatctcctgacctatttcttttaccgactgcttcatgcctttcacatcttcttttacgtttttcacagtctttttggcattgtcaaccgtctttttggcaccgtctatgttaattccgatcaaagttttcttcaagccctgttcaattcctttccagaaaagattgaagaaggatttggtaggatctctttccacatcttccacttgtacatcttcaggaagttttcccgagtctgtttttaccagaagattggcaactgcggttaaaaaccctttcttttcacggttgtttttatctaacaccgcaattttaaggtctttatgtttcagattaaaacttccgttcagccctttcggattccctctgaaattaaaaagcatttcctgaatagttcccgttgccgttacatgaagataaggacggataaacgggttgattccctgcgccggaagattggtggttcttccagaaatagcaaacacatcacgctgatcggcaacatcgaaattccagtttacagaaagcggtgcaagcttcataaaagaacagtctattttaatatccactcttgttggtttccctttcattttggcagagttgaggtttttaacattcatattaaagttgctgaatgtcagttttcccggtcctgcactttcaggcgtatcttcttcatacacaagaacagagtttctaagattcagattattaacgaccatcggaatttttatagaccgtaacaatctggaatataaaggtttttctttaggatcatctttcgggattttacttctgaaaatattggcatccgcagactcaatggttacattagaagcgttaatcgacttattctccgaaaacagatcccatgctccgtttgctgtaatctgatttactttaatatcatataaatctctttccacaggaatcattttgataaactgtgctctcgaaacgagaggcttcatcgcaaactgagaaagccggatattgtttttatcgaccttcaaagcgccggaagtcatatgataaaactcggttttgtaagcaaaattgtccgaagtaagcgcatagttttttacatcaaccgcaattcctgagttgtccggttttgaggtaagctgaatatcattaatggttgcattgagacgggcaaaactcaacggctggttgtttttctcatacgtaatatcagaattcttcagcactacttttctgatgattatcggaaactgaatcccactgagattggctgtttttttcgctgtttttatttctcctgctttaatgcttcctttcacctgatctaccagaacatcttttacatcaaggttcagttttttatctacggattcccatttattgatgttgaaaccaatataatttgcgacaagattcatggaagtttttcctgccactgaaccattcggaacgacggaaatattccggatttctccttttttcggatttaacgtgaaactttttacattaaaatcctgatgatcggagtacaaaatatcctgcgctgaaaactgaaagtctttatatcctaccggaatcagctcttcccttgtttccttgtcaaatttcagtgtattgatgttcaggtttgccttttgggcgtagagaagtttttctccgttaggtttcatcacctgaacagtagcattgtttagcttaatatcttcgagatcaatatcaaaattaagcggttttttaggctttaccggagctgcatcggtggtgtaaatcttaaaatcaggattataaaaatttgcgtttgccagagaaactttattctttttcagaacaatatctttgaactccattttttcgatattaaactgaaaaagctgcgtctttttaggataatattttttaaactgttcaaaagtaacgagtggagtcaattgaaactgaccaatcgacatctgtccgtttctcgtttctattttattaatttccaatgcatacacattatccggacggaagaagaaattacttcctttaatggagtactgatcgaaaaccactggcaatttatcttctacggactcttccgtcatctgaagattttccacatacagattcagatcctgcaccgaaaagaatttctgtttcgtaaatctgaaaatgctgatatttccttcattgattctgatgttgtcaaaccgtaccggatttctcttctttcctgtttttgtatcaaccggtttcgcaagaataatattcagattcggtttagacagcagtaaatctgatgaactgatctgtttgttgaaaatggcatcataaataccaaaacggcttattttcaaagtgtcaatcgtaccctgaagtccgataacattgaaattctgagggtttttgctgttgacggtaattcctgtcgaaagaatattccccgacagaagatcaacatccagacttttgtaggaaactttataatccgtattgtttttaatgtatttcggaagccttgttttcagccagatatttagcccaagatttgccagcaaaacaattaccagcataattccgagagcaagaaataatttttttacccatcctttcattttttgtgatttggttttaattcaatattctattaatttttaacagtcaattcaattacatacccttcatgtcctcttacattaataaactcacctccttcgaaacctaagtactgtcctttaattcctgttaattttcctgtatattcaggtcttttatcaagagtaaaagatgttactttttcaggtttttcaaacggataatcgaatctccacagattttcgccttcactgtagaacttctggaaatcttcaggaaaatattcttttatcttctgctgaaaatcggcaagatctatatcatcttcaaaatcgtcctgaagcattttcttccagcttgttttatcggcaacatgctgcttcaaagcaacctctatcattcccgcttcatatcggttttccgttctcgcaatcggcagcgcaaatgtagcgccctgatcgatccatcttgtaggaatctgtgtatttctcgtaacccctacttttacttctcccgtgtacgcaagataaacggtatgtggctgtaactgaatttccttttctatatccaaatcccgttccgcaattccaagatgtgctgtggaaagttcgggacgaatgatggtatcgcttgcataaggactttcaaagaagcagtttttgcagaagcccattctgtaaatcggtttattttcgccacagtttacgcattggtaacctgtatgttttatggtaagttcttttccgaaaagttcgttcatgtggataagatcaccggaaagattaaggtaatattggatcggctcgtcgtggaagctcgtcatctttaaaatttgcccttgaaactgcattgtattaagtttaagtaaatataaaaaatttaaaatttatttgattttgttctctgatttcagcctgctgatttcttctttcaaagcatcaatctgattctgaagttttcttacgtccggattattcatattttcagaatgtggcgaatattgccagattaaatgaatgtcttttaccagatcattatgctcatccagcctttttttactgagggaaacgctgtcattcagcaccgtaattctcaggaaattgctttctccttccttaaaaggttcataattgatgatggcgagttccggatgattttctctgatctttctgatataattttcagaccgttctttcagtgtttctttttcccatttctttttggtgagtaaaacactcggaagcagaataataacagaagccagacttataattaatgagttctttctgttcgccgcctttcctttttccatgtagtacttctgataaccgagtacaagactcagaatccatgttcctaccgcaataaagaaacaattgattaggtaaaaataaaatccgccccagaaatattcccagtttccgttggcaatcccgaatcctgctgtacaaagcggcggaatacaggcggtagaaaccgcaactccggcaattacttttatggcttcttttcttacaattcccagaaaccaggcaaaaccgcccaacaaagccagagaacagtcgaaaatagtcgctgttttaaaactttccagttgtgaagtttccgagtgaaaaggagaaactaggaaatacagagtggaagaacaaagggcaacgataatcatcagaagccagttgaaaatgcccagcttgatcagatgtctgttcccgatagaaaatccgaatgcaatacctacaacaggtcccattaaaggagaaatcagcatcgctccgattactgccgccgaactgttgatatttaaaccgatgcaggcaattcccatagagatcaccaaaagccagagattgtgtccgcgaaagtaaattccctcttcaatttcctgaaaagtaaattcttcctcttcttcttttggcaaggtgaataatttttgaaaattaatcatttatgatatttatagcaaaagtataaaaagagcatccaagtattttaataaatttgtggaattaaaaaccaacaaatgaattatctcataaccggaggaagcggtttcataggttcccatcttgctgagcaattattgaaaaaaggacattctgtcataaacattgacaattttgatgatttctacagctatcagataaaaattcaaaatactttagacgctattcaatatttttcggattttgaatactccggaaaagataatgatattaaaaatttaatttctctttcacaatcagaaaattacaggctctattatcaggacatccgcgacaaaaaagggttggaggaaatatttaagaaccataaaatagacaccgtcattcatcttgctgcacttgcgggagtccgtccttctattgaaagacctttagaatatgaagaagtcaacatccgcggaaccatgaatctctgggaactctgtaaagatttcaatatcaataaatttgtctgtgcttcctcatcaagcgtttacggaaataatgaaaagatccctttttctgaaaccgacaatgtagacaatcccatttctccttatgcggcaaccaaaaaatgtggtgaaattttaggatacgtttatcatgatttatataaaatagatatgatccagctcaggtttttcacggtttacggaccgagacaaagacctgatcttgccatccacaaattcacaaaactcatttccgaagatcaggaaatccctttctacggagacggaaccaccgcaagagattacacttatattgatgatgtggtagacggaatctggaaatctgttcaatatctggaaaatcattcagacgtttacgaaatcattaatctcggtgagagcgaagtgattaatttaaatgaaatgctttccacgatagaaaagactttgggaaaatctgccatccgcaaaaatctgccaatgcagcccggagatgtcctgaaaaccaacgccgatattgccaaagcaacaacattaattggctacaaacctgacacaaacttccaaaatggcataaaaaaatttgtggaatggtttttgagaaaatgacctcagtaagccggaaaaagtactgtaaacactttctgaaggcgcacgatgaacaaaatttaacaaaaagaattgaaaatcaagtataaaaaagcatataatataagctaattttatacttttgcaaaaaattaaaaaattatgtactggacattagaattagcttcatacttaagtgacgcaccttggccaatgactaaagcagagcttatcgactacgcaatcagaactggtgcaccaatggaagtagtggaaaatcttcaggctatcgaagatgaaggagaaatttatgacgcgatcgacgagatctggagcgattaccctacggacgaagattatctttggaacgaagacgaatattaatgaaaagcattaagctttaggcactgcttagagcttttttgcccttttttatatattattttttacacaataagtgttatttaaaacgcttaaaggatatccttttaagcataaagcaaaaaatttatgagttttttaaacaaagttctaaaagggtttttgggagacaaaaaagcgcaggacctaaaagaagtaaaaaaagttgtaacaaaaatcaaagctgttgaacccgctattcagcaattgtctgatgacggtttaagagataaaactgctgagtttaaagaaaatattaaatctgcaaccagcaaaatcacagcacagatagaacagatccaggagcagattaaaaattcgaaaaacgtggacgaaaaagaagcgcttttctcgaaaattgagtctctgaagaaagaatcatacgaaattgaagaaaaagttctgagccagattcttcctgaagttttcgctttggtgaaggaaacagcaagaagatgggcacaaaacggagaaatccgtgtaacggcttcagactgggacagacaattggctgccgcaggaaaagatttcgtggaaattcagggcgatcaggctgtctggaaaaactcatgggacgctgcaggaacgcctgtaaactgggacatggtacattacgatgttcagtttatcggagggatcatcctacacagcggtaaaattgccgaaatggcgaccggagaaggtaaaactttggtaggtacgcttccaattttcttaaatgcacttccgggaagaggagttcacgtagtaacggtgaacgactatcttgcgaaaagagactcggcatggatgggaccattgtaccaattccacggaatgtcaatcgactgtattgataatcaccaaccgaactcagacggaagaagaaaagcatacaattcagatattacctacggaaccaataatgaattcggtttcgattatctgagagacaacatggttacttcaccttcagaactggtgcagagagaattgaactttgccatcgtggatgaggtggattccgtattggtagatgatgcaagaacaccgttgattatttcaggtccggttccacagggagacagacaggaatttgatgttcttaaaccttctatcgacagaattgttgaagttcagaaaaaaacagtttctacgatttttaatgaagcaaaaaaattaatcgctgcaggaaatacaaaagaaggagggtttaaattgcttcaggcttacagaggtcttcctaacagcagacaattaattaaattcttatcggaaagcggaaaccgtgctttgcttcagaaagtagaagcgcagtatatgcaggacaacaaccgcgatatgccgatcgtagataaagatctctacttcgttattgaagaaaaaaacaatcaggttgatcttacagacaaaggtgttgaatacatgtctcagggaaactctgatcctaacttcttcgttcttcccgacattggaacagaaatcgcagaactggaagctaagaatttatctaaagaagaagaattcgaagcgaaagaaagacttttctctgattttgctgaaaaatctgaaagagttcacacgatgagccagttgctgaaagcgtatacattatttgaaaaagacgatgaatatgtggtcattgacggcgaggtaaaaatcgttgatgaacagacaggtcgtattatggaaggaagacgttattcagacggtcttcatcaggcgattgaagcgaaagaaaatgtaaaaatcgaagctgcaacgcagacgtttgcaaccattacccttcagaattatttccgtatgtacaataagcttgcggggatgacaggtactgcagaaactgaagcgggcgagctttgggaaatttataaattagacgtggtggtaatccctaccaaccgtccgattttaagacacgacagacaggatttagttttcaaaactaaccgtgaaaaatacaatgctgtaattgaagaaattgaaaaattaacggctgcaggaagacctgttctggtaggtacaacatctgttgaaatttcacagttgctttcaaaagcccttcagttaagaaaaattccgcatcaggttctgaacgcgaagcttcacaaaaaagaagcggaaattgttgccggagcaggacagccgggtgttgtaaccattgcaaccaacatggcaggtcgtggtacggatattaaattatctaaagaggtaaaagaagcaggaggtctggcaatcatcgggacagaaagacacgattcaagacgtgttgacagacagttgagaggtagagcaggaagacagggagatccgggaagttctcagttctatgtttctctggaagataacttaatgcgtttattcggttctgaaagaatcgctaaaatgatggacagaatgggtcataaggaaggtgaagtgattcagcactccatgatctcaaaatctatcgaaagagcacagaaaaaagtagaggaaaacaacttcggaacaagaaagagacttcttgagtacgatgatgtaatgaacaaacagcgtgacgtcatctacaagagaagaaagaatgctttgttcggagatcacctgaagtacgacatcaccaatatgatctttgacgtggcaaattctatcgcagcaaaaggaaaagcgacaggaagctataaagatttcgaatacgagatcatcaaaacatttacgatggaatctccggtttctgagaacgatttcaagaataaaacggttcaggatttaacgaacattttattcaaggcagctcaggaagattatcagatgaaactgaacttactgaaagaaaaatcgttcccgattatcgagaatgtttatcagaatcagggttcaatgttcagaatgattcaggttcctttcacagacggtcataagacaatgacgatcgtaaccgatcttaaagaagcttatgaaacgcagtgcgacagcttaatcaatgattttgaaaagaacattacgttatccatcatcgatgaaaactggaagcttcaccttcgtgaaatggacgatctgagaaaatcttcacagggagctgtttacgagcagaaagatccgttggtaatttataagcaggaatctttccacttattcagcgaaatgatcgagaagctaaacaaagaaattatatctttcttatacaaaggcgaaatccctgcataagaataattaacaataatttaaaaaccgttacaattcagtttgtagcggttttttgttgtcatttccctttctttttatgacaaaaatcaattttattatttatttagaataattaaaaacaatatatttgcataaaaatttaaggtttcatgaaaaatgtactgatctgtgcttcgctgttaggttccatgctaacgtttgctcaggaaaaagattcaattaaaggaaatgatattgaagaggtaattgtaaacggaaaatattacaagaaatatgtagaaaaggaaggttcttcttctattcgtctggacgaagaattaatcaagattcctcagaatgtttctatcattacaaacagagcattggaagatcagcaggttaccactttgggagatggtgttcttagaaatgttgcaggagctcaacgattggaacactggggagatatgtacaccagagtaaatatgagaggttccagagccgcagctttcatgaacggagtgaatgtaacttcaaactggggaccgcttagcgaagatatgtcgtatgtagaccacattgaatttataaaaggaccttccggatttttgatgtctaacggtgagccaagcggaatttacaacatcgttaccaaaaaaccgacaggacagtctctgaacggttctgcaagagtaactctcggaagctttaatatgtacagaggagaagctgatgtagatactaaaattacagataaagtggctttcagattaaatttaatggctcagaatagaaacagtttcagagactatgaatttaatgacagatacatcatcaatccttctttaaaggtaaatcttaccgataaaacgactttaacagcagaatatatttatcagaaagcaaaaatgtctgaagtaggatctgcttatgttttcagctatgaaggctatgccacaaaaccggttgaatacaccatgaccgatcccggaattgcacccaccaatgtggataataataccgtaaatgtaaatcttcagcataagtttaacagcaactggaaactgacgtcacagctaacttatgtgaatgaatatactttaggaagcgacatctggccttctcaatttttaccgaatggagacatgatcagaacgctttatttttgggaagcaagcaatgtgatgaaattcggacaggtatttctgaacggttatttcaaaacaggagctgtttctcataaaatcttaacagggctggatctcggctctaaaaaatatatggcagactggaatcaaaaccatgatttagacacagccgcaaaaccttttaatattaattcaactacatacagcccgccttccaacggatatgcacagtttgatacaagtacttcgctggaaagccgagcaactccatacggaactattgaacaaaattataccggattatatattcaggatgaattaggattttttaatgatgctttaagattaacccttgctgcgcgttatacgaatgtgaaagaaaattcttacggaaccaaagcagaagcagacaaaattacgccgcgaatcggaataagctattcgattgacgataatacttctgtgtacggtttatacgatcagtctttcgttcctcaggcagggtttttcagaaccggaggaattccaaaacctattaccggaaacaacatggaagttggggtgaaaagagactggttcggcggaaaatggaatacaacgttgtctttatacaatatcatcaaaagaaattctacggttgcagatcctgcaaacagtgctcttgaaaactttattattgatttgggtaaaacaagagttcagggaattgaatttgatctgaaaggtgaaatcacaagaggatttaatgccatctttaactatgctttcacggaaaacaaaatcacagaatccaacgatcctgtaagcaatcctgtaggaatgagaattccgggttatgcgaaacacacgatgaacggatggctgaactacacctttacacagggaactctggaaggctttggcttatcattcgggggaacctatcttgcagaccgaagcagttggaactgggcaaatagcggaacgcagaaagatatggacgattatgtaaaatttgatgcaggactttcgtgggaaaacacaaaattcagagtcggacttaatgtcttcaatgttttcaacaggtatctttattcgggatcgccatatggagcgtactactattatcaggcagaagccccgagaaacttcagactttctgtcggatataaattttaattatcaatcttaaaagttagcctttccggaggctgacttttctttcattaaaagtttaataaaaaatgaggaaaaagcatcatcacaaaaaaaaaccaagtgcttttaaaaaatggacgggaaaactgcatttgtggctgggtcttgggattgggtttctgatcttcattatttcgataacgggagcattgtacgttttcaaggatgaaattgaaaatgcgacgagaaaagacgtgatctatcataacgagcagaatatcgatcagaaacagattcttccgataagaacgctggaaaaagcagtggtggcgcaggtaaaagaaaaatatccggtgcattgggtgaatattccgattgataaaaagatgtcctatcttttctactggtacgaacatgatccgaaaggctggaattattttgatgaatttcccatctataaggtagcttatgtaaatccctataacggaaaagttttaggaacctacgacgagaaaaacggatttttccagatcgttaaaatgatccactggagttttcttttaaaacagtcttggggaacctacgttgtgggaattcctgtcctgatcttcgtcttcatgctgatttccggaatcattctgtggtggcctaagaacaaagccgcaaggaaacagcgtttctccttcaaatggaaaaatgtacaaaactggaaaagaaaaaactatgatcttcacaatgttttaggtttttacgcttcagttttcgcactgattttctccattaccggattgttttacgcctttgtattcgttcagtcatcaatatatttcatcttttcaggaggaaaaacggcttatcccgacttttcatccatcacaacaaaagcgccgattgagttgagaaccgaaggaactttagacaaaataagcaataccgttaaagcaaaatatcccgattcctataacttttctatcgatctcggacacgaacacatggacgatcatgaacatccgaatttcgaagtctatgtaaaacacctctcctattcttaccacaaaagcagcagtttaatctttgatgaaaactcgggagaactgcttcatacccacgatatgaaagacaaaaatttcggcgaaaaaacggtgggagccaattatgacatccatgtcggatctattttaggacttcccacaaagatcatcgctttcattgtaagtttgatatgtgcctcattaccagtcaccggcttcatgatctggtggggaagaagaaaaaagaaaaccccaaaagcaacataatatttttttaaaataaatctttggttaatcgtctaataataagatcttttttataattttagccttttagaattttagaacagaatgtcattagtagatttgtcaaaaaacgttgcgctgggaattgatattggcggaacgaacacaaaatttggagtggtaaaccacagaggcgaagttttggaaaaaggaaacatccgcacagatgcctatcctactgtagaagaatatattgacgctttatacgaagcggttcatcccctgatcgaaagccatggaaaagagaaaaattttgatggaatcggggttggtgctcccaatgccaattactatacaggaacgatagagcaggctcccaatcttccgtggaaaggaaccatcccttttgctgaactgatgtcggcaaaattcgggcttccgtgtaccattactaatgacgcgaatgctgcagccatcggagaaatgcttttcggagccgcaagaggaatgaaagatttcatcatgattactctgggaacaggcgttggaagcggaattgttgcgggtggaaaactgatctacggacacgacggatttgccggagaactgggacacaccatcgtaaaaccgggcggaagaaaacactggagcacgggttctgagggctgtcttgaagcctatgcatccgcaaccggaattgcgattaccgcaaaaaaaatgagagccgaatttcctgaatctttactcaatcagtatcctgaagaatccattaattctaaaactgttcacgaatgcgctttacatggcgatccgatttctattgaagtgttccgatataccggacagaaactgggtgaagctttagccaattttgtaatgttctcttctccggaagccattcttttatttggcggcgtgataaaagcaggagattttattttaaagcctaccaaacttcacatggaaagaaacttacttcctattttcagaaacaaggtaaaattggttttcagtgaactggacgaagccgatgctgctattttaggcgcaagtgctttggtttgggaaaaataaccggaaccattttgattatctgcgtttgatttctattaaattttttaacgcaaaatcgcaatgattctcaaataaaacaggcatccttttgtaagggtgctttttgtttttatttcatctttgtagatgcttcggcaggctcagcatgacaccgctgatactaatctctatgagtaacaaatttgcggcactgtcatcctgagcgcgaagcagttgaaggatctctactctacctcaatactattattaaattctctcgcagatgttgcggataacgcagattttagatttttatttgatgaaaatatttgtgctgattgtgtttgaaaaaaatttgtctcagcgtgacatcgccaatatcaacgactttataagcaagaatttgcagcgctgtcatcctgagcgcgtagcagccgaaggatctttattctaacccgataccattattaaattctctcgcagattttgctgataacgcagattttcgggctttaatttgtgaaaacatttgtgctgattgtgtttgaaaaaatttgtctcagcgtgacatcgccaatatcaacgactttataagcaacaatttgcggcattgtcatcctgagcgcgaagcagtcgaaggatttctatactatctcaatatctttattaaattatctcgcagattgttctgataatgcagattttggatttttatttgatgaaaatacttttgagaattgtgtttgaaaaaatttgtctcggcgtgacattgctaataccaatagccttataaacaacaatttgcagaactttcatcctgagcgcgaagcagtcgaaggatctctactctacctcaatactattattaaaattctcacgcagattgtgcggataacgcagattttggatttttatttgtgaaaatatttgtgctgattgtgtttgaaaaaatttgtctcatctatcatgacaatttgaattttgaacgcccgattgaaaaacttttccttatttttgataggttttttctccattgtttacaggagaaaacaagatattacaataattaatttatggataacaacaatttagaacagattactttcgggggcggatgtttttggtgtgtggaaagctgtttcaatatgctgaaaggagtacagtctgcggtttccggatattcgggaggtcacaaagaccatcctacgtatgaagaggtatgcaccggagaaaccggacatgcagaagtggtacagatcacttacgatcctgctgttatttcttatgaacagttaatggatgttttctttttccttcacgaccctacgcagcttaacagacagggaaatgatatcggaacacagtaccgctctgttatttattacaaagacgaagcggaaaaggcaaaagctgaagcggcaattgaaaaatccaaagaatccggaagatggcagggaacctatgtaacggaagtaacgaaattcgataaattctgggcagcggaacagtatcatcagggatattataacgaaaacccgacccagccgtattgcagtgcagtggtaggaccgaaaattcagaagtttaaaaagcatttcggcgaactgggaatgctgaatgaacaataatttattgtttatctgttatcaatcatcatgctttattttagctcaaaggattttttaatatgactgattacggatagctccaataacaacagaattcgggctgtttccaatggaaacagcccgaattctttttgaaacatttgcaaatgatattctattcttccattatcgcattttctccggcatacgtttcaaggatgtattcggtaacatcttttaaggcttttccgttttcaggatgcttcccgagacttgtaaaaaattcaacatgattattgcttttatcgtaccagacttttcccattgcattatcaacagtaagtgtatccggtcgcataatctttttcatatttataaatgagtagctatgcattggtacaacctcagcatgagaatgcagcgaactgctgtccgttgccatataacggtctttgtcccaatacatatacggtttgtctgtcgcaggagaaccccatcccgacataaatcctaaagatttggaagttttgttgttagaaaaaaagacgcctcctgttaccattaataaaataaaagtcatttctaaaatacctaagccgtttttctttaaaaaatcaggaactttaaaatattgttcattagtaatattaataacgatttttgaaagtttttctgttaaagattcttcatcatcatcaacactaatcttgactgttgttttattttcttcattatcatttttaatgaaagttccagaaaactctgcaaaatctttatatcctaaatattgacttaatatatctaagcgatcaggcttaattctaatctccttatttccaataacataagcatcataatatctggaaaagcttttatcattaatctcaaatttcagatcttctttaaaatacaaccatagataggatgccaatccatttttagtatctcttttggattcttgttctgcttttttaaatacttcggtaattagtagtttattcttggacataattagtttttaagagtattacaaaatacctgatttttgctcattgtgcattacggaaatccgtaatgatttttttgctcattttcttgtccatcgatgtccttgttttgtctaacacacgcattattctttgacgcatctttgtatcagaaatcagtgagaaacaaacaattaaaacaacagaatacaacaaagttacgaaactgatttcaaaaattaccagataaaacggaagaaaactccgggttgggaagcagatgtttctcttccgtttttgaaggttcacttcccaaaaaaaatttaagaagcgcttcgaaaattttaacagtgtacagctcgggatttatttcctgagaggaagaaaaattatccaaactcttataaaatttttaaaaaatgttaaacttaatattaatgctaatctcattagcgttcgggaataataatgccaacacatcatgcaataacaacggaaataataataacggacagccaaccactcaactggtagatccgggaacaggaacagatccgggagacggagtcgatccggatggaaacggaggtccaggtaatggaaatggcggaagcacaggcggaaatacaggacaaacaccccctccgtttactcaaccataattaattataattgagcagattgttttaatctgctcttttttattactttgcagtgtaaaactaatcaacaatcatgaaaaattactttttactttttttattaatattactcttttcttgtaaaaaagaaaatacagaacaacaaaacataagtattgcttccgaattttataataaagcaaaaatatgtagagattccaatgctcctgattctgcgtttatatattacaatttagcaaaaagtgcttatttagaacaaaaagactctttaggagtaggaaaatcgcttgtaaatatgtcaatattacagtataataaacaagattattacggaagtattgaatcatctttggaggcgaacagttttcttaaaaaaatatctgatagcacaacaaaaagcacccttgcatcaagttttaataacatggggatctgttcgtcttatctttatgaattcgaaaactctattttattttataatcaagctttgaaatatgtaacctctcctaaaaacaaatatttctaccataacaatttagcggatgtactaataactcttggagactataaaaatgctcaaagaaatttaactatagcattacaagctaaggatagcttgatgtatgctcaatttattaataatatggctagagcaaaatattacgaaaatccaaattataatcctcttccggaattttacaaagcactgaaaattagaaaagatagtaatgatctacagggacaaaattcaagttatgctacgttgtcaatctatttttttaataaggataaaaaaaaggcgttggaatatgctaaaaaaatgctggaagttgctataaaaaacgatagtaaagaagataaattacaagcattacaaaaaataattaatttagataaagacaattatttagaaaacttcacacaatttcaagcattaaatgacagcattcaaatttcaagaagtaaagctaaaaatcaatttgctgtggtaagatatgatgtagaaaaaatacaaagggaaaaggcagaaaaagaagtacaggttttagagagaaatattggaattggtagtttaattgctcttctaattgctggatttatctggtacataaaaagacaaaaacaattaaaacaagaaaaagaaatcgaagtcaaaaacacccagctcaaaatgtcgaaaaaagtgcatgatgtggttgcgaatggattgtaccatatgatgattgatgttcagaacaatcctgaaatggataagaccaagattcttaatgatattgaaaaaatgtacgaagaatccagagatatttcgcacgaaaatatagcagagaaagattttgccccgcgttttatcaacatgataacctcctactcttctgaggaacagagggttttaccggtgagttataaagaaagtatttgggaaaacattccttacaacacccagcttgagttgtattacatcataagagaaattcttgtgaacatgaaaaagcacagcaaagcaaagctagcttccgtaaagtttgagaaaaatgataaaaatttaatcatcagatataccgataacggcgtaggaatcgccgatctggagcagcaaaaagacacaggaatccataatacggaaaaccgtattgaaagcattggaggagatattacttttgaaaaaaatccaacaggtggattaattattgagataaccataccaatacaatcgaaatatgtttaaaaaagtactgatagccgaagaccatgaagtcagaaatttaggagtggtaaatgcccttaccgaattacagattccgcattttgattttgtaaattattgtgatgatgccctgcaaaaaataaaagccgcagcaactgctgattcctatgatttgctgattacagatctgtcctttgatgaagatcatattgaacagaaagtcaattccggtcaacagctcattgaagaagtcagaaaaattcagcccaacctgaaagtaatagccttctccattgagaagaaaccgaagattattgatgatctttttaaaatacacaacatcaacggttttgtaagcaagggaagaaatgacggaaaagatctcagaagcaccattaaaaaagtttttttcggagaaacggttattccgcaggagattttaaattctataagaaatacgtctttcgaattcacagaatatgatgttacgcttatcgagcttcttgccaaaggatggaaacagggcgacattgaaaaacattttaaagaaaataaaattacgcccgacagcaaaagcgccatcgaaaaaagactgaatgatctccgctatgaactgggagccaaaaacaacatcgaacttgttgtgatgtgcaaagacatcggcatcatctaaatgccacacttcatcgaaaaactaatagcctttcagagattctggaaggtttttttattaaacattctgcgtttacggttttccgtaaccgatcgaaaattaatgctcatatttttgaaatgtaaaacaactaaaaattatcagcatgaaaaaactactattaacaggagtattaggtttaggattattgttaccgacaaccatctccgcatcagcagaccatagcaactcaaaagcaactaccgaatttttctctaaaaaaacaaagaaatctaaagccaagaaaagcagaaaaacaaggagaagcaaaaccagaagctccagaacttactctcaaagcaaaggatgtacgtataacggaaatcagttattcgttggatcgagaggaggatgttattattactccggaaacagcaaagaatacgtagacagatcttactgttccggctgtaactaaatgtagaaatcctaaaaaccaacaaccatgggaaaattcgttatcacacaaagagtcaacaaagagtatcagtttaatctgaaagccggaaacggtgaaattattttaacaagcgaaggttacgttcagaaagcatcctgtataaaaggaattgaatccgtaaaaattaattctcaggacgattccagatacgacagaagagaggcggtgaacaaaaaagattatttcgttctgaaagcaagaaacggagaaatcattgggaaaagtcagctttacagcacaaaatccggcatggaaaacggcattgcttccgtaaaaaaaaatgctccgaaagcagaaattacagatgaaactttaaaaaaataaaatcatgaaaaaactaataccattcatcatattcgcctttggttcttttcttttaaactcgtgttttaaagcaaacgataatatcggacacgacggaagatgtacaggttctgcctattgtaccgcctgttccaactgttcgcggtgcggacattgcagcagcggcggaacctgtggcgtttgcggcggcggctcttcagaaagttattcttccggcagaagttcaaccaagaaaagaaaaaccaagaaatacactgcttccgattattatacttcctcaaaaacaaattccagcaaacctcaaaaaattattattgatgaggtaaacgtagacctcagttccaaccgatacattacaggaattgccaccaccaatatttacgaaaagccatctctcaactctaaagtagtaacgagagtttataaaaacgaaaagctcattccactttccaaagaaggtttatggtacaaagtgaaagtaaaatcttccggcaagaaaggttatgttttttataaggatgtgaagtagtatcaatcttaaatgaatcgaattattaaaatgaaaatatttgattttcttgcgccttaaaaaagctgaattttattaaactttgcgtcttggcgaaaaacccaacgcatgatcccaacaaaaaaagcgaagaatcaattcctcgcttttctttattttctgagcatttccgtatgcggaatgtcgtcttccagatatttttttcccgtatcttcgaatccgaaatctccataaaatttcagcaggtaatcctgcgcagaaatcctgatttcagaagtgtggaaacggttttcgatggtttcaactgcatattggatcaattgtctgcctaagttttttcctctcgccttttctgtggttaaaacccttcctattgaagcttcattgtattttattcctttgtcgaaaatcctgcagttcgccaaaacttcaccgtcttcttccgcccaaatgtgaattgctttctgatcatagccgtctaaatccggataaggacagttctgctccactacaaaaacatcaattcgggcttttaaaaccgcatacagttcgggaaccgtaaattcgtcaaacgtttttattttccagacaatattactcatcaaagcttacattgttattgatcaaaaactcattggttttctggataaaatttaaaatttcatcaccaccctccttcttttctgctgaggttacgtataattccggcagatcttcccatgttttatgaagctctgctttataatcctccacatttttaatcacaacattcggcttcagcttatctgcctttgtaaacacgatagaaaacggaactccgctctcgccgcaccactggatgaattccagatcaatattctgaggtttgtgtctggaatctaccaaaacgaaaagattaaccagatttcttcgattcagaatataattggtgatcagtttttcaaaatcctttctgatcgatttcgaaactttcgcatatccgtaacccggcaaatccgtaagataccagttttcgttcactaagaaatggttgataagctgggtttttcccggagtctgggacgttttagccagatctttatgattcatcattgcattgatgagcgaagactttcctacattcgatcttccgatgaaagcatactcaggaagattcggttccgggcaatcctgccatttcccgctgctctttacaaatgttgctgttttaataaccattttgttgaatatttttagaaaaacaaaccattaagaaaagctcttaatggtcattttatattgtattttaaactttatcttttacccagttataaagaatttcattgaattcatcgggtttctccatcatcgctgcatgaccgcagtgatcgatccagaacaggtctgaattcggaataaacttatgcatatcttccgcaacttcaggaggcgttacattatcctgtttaccccagatcagacacgtaggtgttttaatcttaggcagatcgttcagcatattgtgtttaatggcacttcttgccaacattactgtttttatacccttcattcgatcatttaccacggcaaaaacctcgtctaccagatcttcggtcgctacggaaggatcataaaaaacctcctcggtcttctttcttatataggaacggtcattttttctcggaaaactgtctccgaaagttctctcatataatcctgaacttcctgtaagcacaagatttttaataagatccggtcttgccagtgtaagaataagccctacatgacctcccatagaatttcctacaatcgttacaggaccttcaatatgggtttctataaatttagcaatatattttgctaatgtcgtaagattagtattgagtaccggcaaatcgtagatcggcaactgaggaacgtatactttgaatcctctgtctgaaaaaaaatctaccatcttatcgaaattactcaaaccacccattaaaccgtgcaacagcaccaatggatgtccttcccctgcttctacgaaagtatatttcttttctttttttgtactaaatatcataaaatgccttaataaagccttgcaaaaatacaaattaaacctcaaaaatattttgattaccctaatttaaaataaaaataatatatcaaactcttttttaaagttttttttaaaaatctatttattatggcgtaaataagaggtttatcaacgtccaacatatcaaccctttacaccatcgaaattaaatctttaataaaacttattaacattaaggtaaaaagtgggaaaaagtgggagattttagaaattattatataaatttgtcccaaatgaacagtttcattggaacatatgagtgtaaaattgacgacaaaggccggttaaaagttccttcatctttaattaaacagatggaaaacttcgacgacaaggcgtttgtagtcaaaagatctgtgttccaaccctgtctggaagtttatccgatgaacgcatgggataaagtgatgggcaaaattaataaactgaacagattcattaaaaagaatgctgatttcattagaatgtttacggcaggtgtaaaaattgtggagctggataacgccggaaggttacagatttctaaagaccttactgtttttgccaatcttcagaaagagattgtaattaccagtgcgggagaattatttgagatctgggataaggacgattacgaaaaggtaatctccatcagtgaagacgattttgcgaatcttgccgaagatgtaatgggcacgttcgaagaagaataactgcgttgtaaaaacgtaaaaaaacacaactaaaacatgtatcataaccccgttttgctgaagcagagtgttgatgatttggtgacgaatccagacggaatatatgtggactgtacttttggaggcggtggccattcaagagaaatattgagcagactttcggataaaggaaaactgtttagttttgatcaggacttagatgctcttgaaaatacaattgatgacccgagatttacactcatcaatcagaacttcaggtttctggaaaactctttattaatttacggagtttctcaggtcgacggaattttggctgatcttggtgtttcttcgcatcagtttgatgaagccgaaagaggtttttctacacgaagcaatgctccgttagacatgagaatgaacgtaatgcagggtcttgatgccaaaagagtgattaacgattacgatgaagagcagcttgccgacattttttattattacggtgaactgagagaagcaagaaaattagcaagagacatcgttcatcacagaaaaacaaaaagtattgatacaacagaagatctgaaaaaactcttcagttatcttccgccgcataaagtaaataaattttatgcccagttgtttcaggcaatacgcattgaagtaaaccaggagctggaagttttaaaagaaatgcttgttcaggcatacaacgttttaaaacccgaaggaagactggtggttatctcttaccattctctggaagacagactggtaaaaagatttttgaaaaacggaatgttcgagggagaacccgaaagagacatttacggaaattataaaaaagcattcgagctggtaaagagcaaagcaatcattcccgatgataaggaaatagaagaaaactcaagagccagaagtgctaaaatgagaacaggaataaaagtataaataatgagtaatgggcaataagcaatttttaaatattacacattactcattaccaattactaataaataaagtggcaaaaagaacaacaacaaatcgccctcagaagagattaacttttatagacattataaaaggtaatttcctgaatcgtgatgagattaaaatacattacaagtattttctgctgttgtttgtattgatgatggcaatgatttacagcaatcacctcgtcaataaaaaaattaaaattgtcaacacacttaaagaagaaacagaagaatataaatcgcgaaacgcttacgcacaaagtaagctgataaaagtaaaaatggaatcggagttggggaaagaggttgcacgggattctttaatgacccttgaaaaccatcctcataaattgctaataaaactggacagtacagatgcaaaagcaaaatgaatacgacaacaaacgtaagaaaacgttacgatggggctatctctttgcagtggtggctttgtgcgtgtttgtaatgttcctggcgcgcatcgttattcttcagaatacgaacgttcaggaaattaaagacgattacatcaacaaaaactatcgcgaagccactctgaaagcagcaagaggaaatctttttgcgtcagacggttccattttggcaacaaccgttatgcgttatgacatctatctggatttcaaaacgatgaaagacaccatttataccaacaacattggtgctttaacggattctctcagcaaaatgttcggaaagccaagagcagaattcagaaagaaatttgacgagcagagaaaaaagaaaaaccaatactacactttggttaaagggcttgattttgatcagtacgacagaatccgcaaatttccgatattcaaaagaggcaaaaacaaaggaggttttatcgtagaccgaaactataaaagagaactggctacttcagaaatcggagccggaaccatcggaatggacgacggcgttcacacagcaggtcttgaaggcgctttctctaaatatttaagaggaacagacggaaaaagactggagcagagaatcaattcatcccaatggaagccaattgattattggaaagtgcaggaacctgttgacggagaagatgtttataccacattagaccttagaattcaggatattgcacactcggctttacagaagcagctcgtgaacttcgaagcaaaacacggaaccgtgattgtaatggaagtggaaaccggaaaagtccgcgccatggtaaatttaagaagaaatgacgatggcgattatgtagattcttacaattatgccctgaaagacaatattgaaccgggttctacctttaaaaccatttcacttttggctgcaatggatgacggtttcatcgatgaaaatacaactgtaaatgtaggaaacggaatctgggtgtacgcaaaacaaaggatttcggacggtcacggcggcggaacgtatgacatcagcgatgtgttggctaaatccagcaacgtaggttctgcaaaactgattacaaaatattacgccgaaaaacctcagattttcttagatcatttaagaagatggaagctattcgataaaatgaatattgaacttccgggaatcacaaaaccaaaaattttaactcccgaaagcaaaagatggaatgccgcaacgctcgcatccattgcctacggatattctacaaacataaacctgttgcagttagccactttctataacggagtcgcaaacaacggtaaaatgctgaagcctttattcattgataaaattatgaaggacggaaaagtaatgtacacggcaaaaccggaagtaatggtcaacaaaatggcatctgaaaaagccattaaaatgatgaccaatgctttaacaaaagccgttgaaaaaggaacagcaaaaagtattttcacaccgaatttaaaaatggcaggaaaaacaggaaccgcaaggtttgaatactggcttcctggtccaatgaaataccgctcgtcatttgcaggcttctatcctgctgataatccgaaatatacctgttatgtgatgatcagcgagccaaatacatcaaaaggattttatggagctaccgttgccgcaccggtatttaaagaaattgcaggaaaaacattcctgaaaaccccgcagaatattgaaagagaaatgcttgtcgacaaaaaggtaaacctgaacaaaatggtagaacctaatgtaaaagtcgcagtaaataataaacagatgccaaatgtagtaggactcatcggtaaaaatgtgattccacagcttgaaaatttaggctaccgtgtagattttaagggtgttggaagaattaaagaacagttcccgacagaaggcacaaccataagcagaaaccagagaatttatctgtctctgcagaattaaaaaagaaaagaaaagaacccgaagggttcaatatgaataaccgtaagtgaaacttatggaacaaataaagagaaatgcagttaaatgatttattaaaaagaattccggtattagaaattcatggtgacgacagccgtgaaatttcagaattggtattcgacagcagaaaggttacggaaaactccttgtatattgcaatgagaggaacggttgtggacggacattcatttattgcatcttcggtggaaaaaggagcaacagcaattgtttgcgaagaattcccagaacatcttgatgaaaatgctacttatattaaagtaaaagattcatccaaaactttaggtcatttagcgtccaatttctacggtaatccttcagaaaaactaaaattaatcggagtaacaggaaccaacggaaaaacttctgtttctaccctgctttttgatgtatttaaaaatttaggatatgattccgctttgctttctactgttgaaataagaatcggagaaaagatcattccggcaacgcacaccactccggatgttattaccatcaataaaattttagctcaggcggttgaagaaggctgcgagttcgcttttatggaagtaagctcccacggaattgcccaaaacagaatcgagggacttcactttaaaattgccggatttaccaatcttacacacgatcatttagattatcataaaacgtttgacgaatatctgaaaacgaaaaaaagatttttcgatcagttggaagattctgcggttgccatcaccaatgtggatgataagaacgggaatgtgatgcttcaaaacacaaaagccacaaaaagatcttatgctttgaagacaatggcagattttcacggaaaattactggaagtggatttcaacggaatgctgctgaatttcaacggaaaagaattctggacaacactcaccggaaaattcaatgtctacaacctcttattggttttcggaattgcttccgagctgggttttgaatcagacgaaattctacaggcaatcagcaaactaaaaagagtgtccggaagatttgaaaccttcaaatccgatggtggaattttcttcatcgtagattatgcacacactccggatgcattggaaaacattctggacagcattaatgatatcagaacaaaaaatgaaagactgatcaccgttttcggatgcggaggcgacagagatcattcaaaaagacctgaaatgggaaatattgccacgaaaaaatcaacattggcaatcatcacttcagacaacccgagaacagaagatccggcagcaatcatcaaagaaatcgaagccggtgttgaacctcagaatttcagcaagtacacttccattccggacagaaaagaagccatcaaaatggcaataaagtttgcagaaccgaaagacatcgttctcgtagccggaaaaggacacgaaacctatcaggaaataaacggagtgaaacatcattttgacgacaaggaaacgattaatgaactgtggcagcttatgagtaaataaatataaatgattattgataattgattaatgatggaaaataattacaatcagatttttgctcaaagaacaaaaactttagcaataaatataatcaatagtttatcagacttaccatattctgataaagtatccgtaatcagaaagcagatttttcgttcagcaagttctgtagcagccaattacagagcaatgtgcagagccagatcagataaagagaaatatgctaaaatttgtattgtcatagaagaggcagacgaaacagtattttggctggaagtaattcaggaagttaatatagcttcaaaaataatgacagatgaacttatgaatgaatctttggagattctgaaagtaacatcaacttataagaacaaattaaagagtaagattatttaatatcggttagatatcaatcatcaattatcaaacatcaataattaagaaatgttatactatctatacgaatatttaaccagcatgggaatccacgttcccggattgggactgttgaaatacatctccttccgtgcaggaatggcggttctgttttctttaaccatcgctttggtgtatggaaaaagaatcatcaactatctgagagcaaaacagatgggagaactggtgcgtgatcttggtctggacgggcagaaacaaaaagaaggtactcctacaatgggaggtcttatcattattttggcaacgttaattcctgttttgctatttaccagaattacaaacgtttacattgttcttctgattgtttctgtgatatggatgggtgcgataggttttctggatgattatttaaaaaagatcaaaaaaaacaaagacggtttaagcggtaaattcaaaattgttggacaggtcggattgggattgatcgtaggagttaccatgtattttcatcccgatattaccgtaaaaagaaaatatgcagacgcaaaagtggtaaacagaaataatgtagagcaaaactttatgcctaccgagaaaataactgtttctaccgttccgtttgctaaaaataatgagttcgattacagcggaattctgttttggatgaacgataaagatgcccacgaatgggcttggattgtttttatcccgattgtaattttcatcgtaacggctgtttcaaacggagccaatattaccgacggaattgatggtcttgccgcaggaaccagtaccgttattttattaacgctcggcttgtttgcctatctttctggaaacatcatttttgctgattatctgaatattatgttccttcccaacatgggagaaaccaccatattcgtggtcgcaatggtaggagccgtaatcggattcttctggtacaacacctatccagctcaggttttcatgggcgacaccggaagtttgatgttaggcggagttattgccgttttagcgattattttaagaaaagaactcatgattcctgtactttgcggaattttcctgatcgaaaatatttccgtgatgcttcaggttgtcgtttttaaatacagaaaaagaaaattcgggctcgaatatgcccaaaacaatagactattcagaatgtcccctttacatcaccattatcagaagggaggctttcatgagagtaaaatagtgaacagaatgatcatcatcggagtaatgctggcaattgtatgtctgatcacattaaaaatgagataaattttgtaaaaagtaaaaagtattgatgtaaaaagacaccagatacattgtacgttttacattttacattttacaaaagaataaatatgaaaatagttgttttaggaggaggagaaagtggttgcggagctgcctatctggcaaaaaagaaaggaatggaagtttttctttccgataaaggagccatcaaggataactacagacagtttctgaacgagaatgaaattgaattcgaagaaggaagccacgatgaagaaagaattttaaacgccgactggattgtaaaaagtccgggaattccgaaaaaggcggaaatgattcagaaaattaacgagaaaggaataaggctttcttctgaaattgaatttgcttcggagtttacagatgccaaaatcatcgccatcacaggaagcaacggaaaaacaacaacaacgtctctcatctactacatcctgaaaaacgacggattaaacgtaggtttaggcggaaatatcgggtacagctttgcaaagcaggttgccgatgaaaaccatgaatattatgttttggaagtaagctctttccagttggacgatattcagaatttcagaccgtatatttctttattgttgaatttgtcacaggatcatctggatcagtacaattacaactatgaagaatatgctctggctaaattcagaataacggagaatcaggaaaatgacaacttcttcatctacaataaagatgatgaaatgagcaaaaatattcttgaaaaattagaaattaaagcgaaaatgattcctttctccaccaaagaaaaactggaagaaggaggtttcattaacggcgataccattgaggtaaaaatgaaagataacttctcaatgaaaattgatgaattatctcttctgggaacgcacaatgttgccaacagcttagccgcgtcaattgccggtaaaatattggaaatcaataatgaaagcataagaaattcattaatgacctttcaggcggttgaacacagactggagcttgtaacagaaattgagggtgtaaaatacatcaacgacagcaaggcaaccaatgttaatgcaacctattacgctttagaaagtatgaaaactccgaccgtttggatcgtcggaggtttagataaaggtaatgactatactgaaattgaagaattagtcaaaagaaaagtaaaagcaattgtctgcttaggaattgataatgagaaaattatcaacttctttaaagacaaaaaagaatttatttacgacacgtcgagcatggaaaaagcagtggagatctcaaaatctctcgctgaaaaaggagatacggttttactgtctccgtgctgtgcaagttttgatttattcaaaaactatgaagacagaggtcatcagtttaaagagcaggtattaaaagccaatggcaattaaccaaaagccaacagcattatatatgaacgaacaagacacagaaaacagatttgaattcctgaagggcgataaagtactttggatggtcatttttgtgatctccattttctctattttcccagtttattctgcaagttcgaatctcgaatatatcgttaataacgggaccacaaccggtcacgttatcaaacatatgttcttcgtggtcttaggtttgggaatcatgagagtggtaggaatggtaaaatacgaatacatcggaaaactcagcagcatcatgcttggtttaatggttattctactgattgtcaccatgttcacaggacaaactattgacggagccagtgcttcaagatggctgaaaattcccggaacaccaatttcattccagccgtcttcctttgcttttttaatgctgattatttatctgtgcagatatttaacaaagaaaataacgcgggaacggcttccgattgagaacatcatgtacatcttcggtcccattttgctggtttttgttctggtggcaaaagacaatggttcaacggcgttgatgattttaatggtttcggttattgtactcgttatcggacagttacactggaaatatattgcaggatttatttctgcatcattcattgcaattgttctgtttttattagtggctttaaacactaacttaattggaggaaaccgtgttcacacatggatgagccgtattgaaacctttacatccagcaaagcaaaaacagccgatgtggatgacgaaagtgtaaaagcaaaaaattatcaggtgatgatggcaaaagcagccatcgtacacggcggagttacaggaatgggacccggcaaaagtgctttaaaacaaatgcttccgcagtctgcctccgacttcattttcgccgtgattgtagaagaatacggagtgatcggagcggtttttctggtaagtttatatttaatcatgattatccgtatcgtaatgatagccagtaagatgcctgcttttttcggctctttgctcgttctcagcctcggagtaatgatttttatacaactttctgtaaatattgcagttgccgtcaatttaatccctgttacagggcaaccgctgcctttgataagttacggaggaacctcaatgttggtaacatatttgcagttgggaattattttaaacataagctccagaattcagatttacgatgaagaaggaatgggcaaaaaacaaagcatagcagagattaacgacattgcttaagataaaaaaagaatataaaaagatttaaacagaaatgaatagtcaatcagcagatagccaaaaatcaaaatccatccgcgttttattatccggaggaggaacaggaggacacatctttcctgctattgctattgcggatgaaatcagaaaaagatttcccgatgctgaatttttgttcataggagccaacggaaaaatggaaatggaaaaagttccgcaggcgggttataaaatcgaaggaattgatattgccggaatcaacagaggaaatcttctgtcgaatctaggattgccttttaaaattttaaaaagtttatccaaatcgaagaagatcattaaaagtttcgctcctgatttcgcagtgggaacaggaggttttgcaagcggaccggctttgtatgaagcaagtaaactcggaattcctatttttattcaggaacagaatgctcatgcaggagttacgaataaaattttaagtaaaaaagcaaaagccgtattcaccgcctatccgaaagtggaaggatttccggctgaaaaaataaaatttctggggaatccgattcgtgagaatattatctcaggaatacagaaaacctctcaggcaaaagaaaaaatgggcttggataaagacaaactgacaattttatctgtcggaggatctttaggttcaagaacattaaataacggatggaaagaaaatctggaaaacctcaaagaaaaaggataccagttgatctggcaaaccggaaaattggattataaggaaattgttgatagttgtcagttgacagttgatgaaaatacaaacgacgagcaactatcaaccaacaaccaaatacaaattaaggaattcatcaaagatatggaaacagcctattctgcagcagatgtcattgtttccagagcgggtgcaattgccatttcagagctggcggttgcgcagaagccggttttattggttcccttcccttttgcagcggaagaccatcaaaccaaaaacgcgatgaatctggttgaaaaaaatgcagcccgaatggtaaaagactctgaaatgcaggaaaaattctggaataccctttcagaaatatgcgaaaatgaaaaagtaagaaaagaaatgtctgaaaatctgaaatattttgccaaaccaaatgcggcaaaagagattgtagacgagatttttaaagtgataaaataatgccacgcgagctttctacatatagaaaattcatttacgaagatgatgctttagaattaataaaaattctggaagagaatcatattgcttatgaattggcaaataattcttcacaattagactccagttttggaggcgatataaacacaaaacagtttgaattaaaaattcaaaaagaagattttagtcaggtcgagaaattagaagaagatttagttaaaaaagaaattgaaaatgtagatcaagactattacctttttgattcttctgatgaagaactgattgaaattgtaacaaaaaaagaagaatggaacaaatttgattatttactcgctcaaaaaatattaaaacaaagaggaaaggaaattagcccggaacttttaaatgtgataaataaacaaagaattaaagatctttcaactcaggaagaaagtccgacttggttaataataatcggatatgcttctgcccttgttgccggatttttaggtgtatttgttggagcttatttaatgtattataaaaaagctttaccaaatggtgatagaatttatggctttactaaaaaagacagaagccacggacaaaacattctaattatctctgcaatagctttttttgtatggattggaataaaactttttagttaaattataataaatgaacaatttagaaacatatcaaaatttttacttcgttgggatcggtgggatcgggatgagtgctttggcgcgttatttccatgcttcgggcaaaaaagtctcaggctacgataaaaccaatacgaaacttactcaaacattaatgagtgagggaattgatattgtttttgaagatgtcattgatgcaaaaattacgtcgcttcagaaagaagatacgttagtcatttatactccggcgattaaaaaactggacattttagattatttcaacaattataggtttgaagtattaaaacgtgcaaaagttttagggttaatcacggaaaacacagactgcattgctgttgccggaactcacggaaagacaaccacttccactctggtttcacacctatgcaaagaagcaaatttgcctttttcatgttttctgggaggaatttctgagaattttaagtcaaatttcctctacaacggctcgcaatattccgttgtggaagcagatgaatacgacagaagcttcttaaacctttctccggattgggcagttattacttccaccgatgcggatcatttggatatctacggagataaaaataccattgaagaggggttcagacaatttgcggctctggttcctgaagatagacagctttttgtaagaaaaggaattgaaatcggaagacctcatcaaacctacgctgtaaacgaagtggctgattattattccgataacctgagaatggatcatgataaaatttattttgattttcatacgccaaacgaaacggtaaaagattttgtctgggaaattccgggaattcacaacgtagaaaatgctacggttgcgttggctattttaaacagtttaggagtagatttcgaaacactgaaaaaagcaattgccaatttcaaaggaattaaaagaagatatacaaaacacatctacgaaaacggtaaaatttacatcgacgattatgcacatcatccgacagaaattaatgccgtgatgggttcaatccgcacgttttaccctgaaaagaaattactggtggtttttcagccccatcttttcagcagaacaagagattttgcagacggattcgcagaaagtctaagcaaatctgatgaactgattttacttgatatttatccggcaagagaacttcaggaaaattttgaaggaatcacttccgattggttactggaaaaagttaatttagataaaaaagaagtttcaacattaggcgaagctttcagtaaaataaaagaaaaagattttgacatccttcttacggtaggggcaggaaatatagacacactgtatgatcctgtttgtgagtggacagagaaaatttaattattaaatatagcgcaacggacacaaagaattttttgaaaacacggaaatttgttcgcaaaggcgtttcactcagcaaatgatagctgaaaatatcatttcagagtaaataaaaacacacaatgacagaaaatgaaatttcaaacattgtttttgatgcagggatgaaagtgcaccgaaaactgggaatcggactttatgaaaatgtttatgagcaatgtttaattcacgagttaaaagatagcggattgaacattgaaagtcaaaaagatattagtgtcaattatgaaggtttaattattgagaaagcattcagagttgacttattaattgaaaataaagtaattatagaaataaaagcagttccggaaattaataaatatcattttttccaaattcttaattatttaagaattacagaaatgaaattagggatgattttaaattttcattctaccttatttaaagatggagtaaaaagagcagtaaacaaattataaaaaatattttcagctatcatttgctgagtgaaacgcctttgcgaacataaaaataaaaagcaagaatttaaagaaaaaccttgcgcccgtagcgttaaaaaagctaaaaaacaaaaatgaaaaataaatacagaatattaaaaattgccatcacagtaatcatccttggatttctgttgagtttctctttgaagaaattcagcggacagaagattacggacaataaaatttctgtgaaaatgaatgaaaaaacaccggtttacttcattgatgaaaaagatatccgggaaattgtaaaaaaagaaaacccttctggaaaagtcggggatcttaatattccggcgctggaaaaaaagatcaataatcttccggcggtagacagcgcaaatgtttatttaaacctgaacggaaaactgaatttagacatcaaacagagagttcccgttttcagattaaacaaagaaggcagagatttttatgtagatgaaaaaggaatagaatttccgatctccaaaacctattctcatccatgcatgttggtgacaggaaatgtaaagaaagaagagtatgaaaagcttgccgaactggttgaaaaaatagacaaagacgatttcagcaaaaaatattttatcggaatatccaaagaccgaaacggagactataatcttcttaccagtgaaggaaattacaaagtcgagatcggggatttagataatatcgattttaaagtaaaaggatttaaagcctttgtagaaaaatatcttgtgtatcaggatccggaaaaatacagcatggtttctatcaaatatcagaaccagattgtaaccaccttaaatcctaattacaaagaaaacgacagtattttaaaagcagccaatatagaactggcaaaagctccggttgccgtagccaaaagtgtggaaccaaagcctaaagccgaagttaaaaaagaaattaagaaaacgggaaatcctttaaaaccgaaggtagcccaagcaaaaaaaactgagaaacctacggcgtcaaaaccgaaaactaaagcaaaagttaagatcgaataaaaaaacatcaatatccataggcgaaaacctatgatccttattaaaacaggaactgaaaaacaaaaaaaatcaaatcggtataaaaatggaaaatcaagagtattcagtaggtctggacatcgggacaacaaagattgttgcgattgtcggaaggaggaatgcacacgggaaaatagaagttctcggtgtaggaaaggcgaaaagtcttggtgttcacaaaggtattgtgaataatatttcgcagaccattaattcaatcaaagctgctgtgtctgaagcacagtccagcgcaggagttcctatccgtaaagtaacggtaggaatcgcagggaaacacatccgttctctgcagcactccgattatattatgcgtgaacatccggataaattcatcacagacgacgacattgaagcattaaaagatcaggtaaaaaaactggtgatgcttcctggagaagaaatcattcacgttttgccgcaggaatacaaagtagattccgaaggcgaaattcaggaaccggtcgggatgcacggtaagcgtttagaggccaacttccatgtggttgtaggacagatgggaagcattcgcaatatcgcgagatgcgtgagagaagctgggcttgaaatggaagcacttacgctggaacctttggcatcctctgaagcggttcttacaaaagaagaaaaagaggcaggagttgccattgtagatataggaggtggtactacagacattgccatctttaaagataatatcatccgtcatacctgtgtaatcccttacggaggaggaattattacggaagacatcaaagaaggctgttccatcatcgagaaacatgcggaacaactgaaagtaaaattcggttctgcggttcctgagcttgaaaaagacagcacgtacgttaccattcccgggcttcacggaagaccggataaagaaatttctctgaaaacgttggcacagatcatcaatgcgagagtagaagaaattctggaaatggtaaatacagaactaaaggcttacggagcttttgaacaaaagaaaaaactgattgcaggaatcgtattaacaggtggtggatccaacctgaaacaccttcgtcagcttgccaattatacaacaggattcgacagcagaataggatttgcaaatgagtatgtggcgaatgataaaaatcagtatcttaaaggtcccgaatttgcgacttccattggtttgttaatggaaagtttaaaaatcagggataaaaagctgaatacggtggaagacactcctgttttggaaaaagagcagccggaaaatgctgctgcacaagctgcgattgaaacttcacaacccgctccgcaggaagttgccccgatacaggaacaacagcctaaagaagaacagcatgagaataaaaaggcggcaaaactcactttcgggcagtcgctgatggaaaaagtaaaaaaattctttgaagaagtagaataaaatataaatgataaaagatcagtgataattgatgatttatttttaattaaaacaaaatcattattcatttatcgcttatcaattataattattaaaagaaactaattatggaaaacataggtacacaaggattttcatttgatttgccaaaaggaaattcatcaatcataaaagtaatcggtgttggaggcggtggaaataatgcgctgaaacacatgtacgaaaaaggtattcacggagtggatttcgtgatttgcaatacagatgcccagactttagataataacccggttgccaacaaagtacagctgggaactaccattacggaaggtcttggcgcgggagccgatcctgaagtgggagaaaaatctgccatcgaaagcatcgaagatattaaagctgcaatgggacaaaataccaaaatggttttcatcactgccggaatgggtggtggtacaggaaccggagctgctcccgttattgctaaagtagccaaagatatgggaatcttaacggtaggaatcgttaccgtccctttcagttttgaagggaaaagaagactggaacaggctgaaaacggtctggataaattaagaaataacgttgactcattaattgtcatcaacaacgataaattaagacagcaattcggaaaccttggattcaagcagggattctcaaaagccgatgaagttttaacaaacgcagccaaaggaatggcggaagttattacgggttactttgatgtaaacattgactttagagatgccaaatctgtacttcagaattcagggacggctttgatgtctacaggaattgcttccggtgaaaataaagccgaagaagcggttaaaaaagcgcttgattccccactattgaatgacaacaaaattacaggagcgaaaaacgttctgttactgatcagaagtggtgtggaagaagtgaccatggacgagatcggagtaataatggatcatatccaaaaagaagcaggaaacaccgcagatattattttcggggtgggagcagacgaagaattgggagattctgtaagcgttcttgtaatcgcaacaggtttttctaacgataacaaaaaatttgcaggaccaacagagaaaattaaaatcagcctgaacgacagctttgataccccaaaagagtctccttttaaaacaagagaggaaagacattctcatgcggagcaggattatgatttcggaggtaaaaaccttttcagattggacgacgaagaccacgaccatccacagttcggggttacgtctactgaaaaaaaaatgactattggcaacgaagagactaaaactgaaataaaattctttgataaagaggaagatacggttaataacactcaggactggagaaacgaagacaatgaggaagaatctttcagcttgttcacattagacgaagaagcggaagatccgaatgatctggaaatagaatcttttaagtttgattttgatcataaaaaagaagaaccacagtctaatactgctttcaataacactttttctgaggaaaaacctgttgaattcagcttcttcgtgaatgaacctgtaaaaaatgagcctaaatctgatttcggacagccaaaagcagaacttgcagcagtcaacgaagtgaatcagcttacggaagagccgtttcagaaagtggaacatttctttcagcatctgaaagaagaacctgttgttgaaaataagacagaaactgaagctccgaaaccagcggaagaagaattcaccttcgtgaataaaaccgtggatcaggaaagagtaatggaaagaagaaacaaactgaaggagtttaattcccgttaccagagtttcgacagctccagcgagtttgaatctgtgcctgcattcaaaagaaaaaatatttcgattgaaggtaccaatgcatccgaccagaacatcaatacttacctgtctgataacaacggaaatatgcagatcagagaaaacagatttttaaataaagatgtagactaaaatttaatttgaaaatgtagcaatttgagaatttgaaaattatagattcgcgattctaaaataattacattttcaaattgtctcattttttcaaattatcaaattaaaaaccatgagtttagaaaatacaataaacgaagctataaaaacagcaatgagagccaaagacaaagtggctttggattctcttcgtgctgtaaaatctcagatattactgcttaaaacggaagcaagaggagcagaagttagtgcagaacaggaaattgctattcttcagagaatggtaaaacagcgtaaagattctgccgaacagtttactgcgcagggaagaaatgatcttgccgaagtggaggaagctcagatgaaagtgattgagcagtttttgccaaaacagctttcagcagaagaactggaagcagaaatgaaaaacattatcgctgaaacaggcgctgaatctatgaaagatttaggaaaggtaatgggaattgcttcaaaatctttagccggaaaatcggacggaaaaagcatttccgagatggcgaaaaaactgctttcataattgctgattgctggtaatttttagttgagtggtcttctatccatcaactaacaaccaaaaaccatcagctattttataaggatattcaacctttgcatatcgatttgattaaagaagcccggaacttttcagttccgggcttcatttattttttctgaatgacatcaattattgctcaaaataaaagcaaaaactgaaagaaatttaattgagagggatcagtgtaaatattttttcatggtcaactgttttcagaatcatttcaaatttagtaattatttttgataattaacatatttaatttaaaattttacaattattattaaactattaacattcaattcattttgttttctaaaacaaccgatagtttttatatattgatgaaaagtaaagaattgcttaaatttgtactttacaaaaaacaaaaatatgtatccacaagatttagtaatgccgatgaaggctgaacttacagataaaggtttcgaagacttgacaactccggctcaggtagaagaagcattaaaacaatcaggaactacccttttggtgattaactctgtatgcggatgtgctgcaggagctgcaagaccgggagtcgtgtattctttaacaggagacaaaaagcctgatcatttaactactgttttcgcaggtttcgatacagaagctgttgttgaagcgagaaaacatttagcaccgttccctccgagctcgccttgcgtagcattgtttaaagacggagaactggttcatatgctggaaagacaccacattgaaggaaatcctgcaggagcaattgctgcaaaccttcaggctgcttacgacgaatattgctagtaaacaagcatttctgatataaaccgttacaatttgtagcggtttttttattttatcatcacaaaaaaattctctgaaaatccaattattattatatttgttgaaatggcaacgaaagcacttttcaatacggtagtcaattggtttatccggcagaggatagatcagattcagaatttcatggatcatcctattgaaacacagaaaggtatcttattttcccagttatttcatgcagaagatacggagtatggcagaaaatatggttttaattccatttcgagttatcaggactttaagaacaaagttccggttgttacctacgaagaaatggagccttatattgaaaaagcaagacagggacagaaagatgtaagctggcccggttacatcaaacattttgcaaaatcttcgggaaccactaacgccaaaagcaaatttatcccgatttctgcggaaagccttgaatactgccacatgaaagccggaaaagatatggtttccatttacgccaacaatcaccccgaaaatcagctttttaattataagaatctgcgtctgggcggaagttcagagctgtatgcggatttcaacaccaaattcggcgacttatcggcgattttaatagacaatctccctttctgggtagaaataacaacgactcccagcaaaaaagtttctctgatgggagaatgggaaagcaaactcagagccattacttctgaagtgaagaatgaagatgtgggaagtattctgggggttccaagctggatgatggtgcttttgcaaagagtgctgaaggaaacagatgttaaaaacatttcagaactctggccaaatcttgaagtgtttttccatggaggaatcagctttaaaccctacagagaacagtacaaacagattatcgggaaaaatatcaattactacgagatctataatgcttccgaaggctttttcggaattcaggacagatccaacagtgatgaaatgcttctgatgctcgattacggtattttttatgaatttattccgatggatcagttccatttttcaaatccgaaagtcgtgagtctggaagatgtggaaatcgggaaaaactacgccatggtgattacgacaaacggcggattgtggagatatctcattggcgataccgttgtttttacctcaaccaatccgttcagaataaaaataacaggaagaacgaaacattacattaatgcgtttggggaagaactgatgattactaacgttgagtctgcgctcaccaaagcctgcgaagaaaccaatgcatccatttccgacttcacaggagccccagttttcatgaaagagaacgaaggcggagctcatgagtggatttttgaattctgcgaaaaaccagacaatttagagcgttttatagacgtttttgacaatcatcttaaatcaattaattccgattacgaagcgaaacgctacaacaatatgacgctgaaaagaccgattgtacatattgcaaagcctaatcttttttatggctggctggaatccaaaggtaaacttggcggacagaacaaggttcccagactgagcaatgaccgagaatatattgatcctttactggaactgaataaataaaaaaaccgcagaaaaactgcggtttcgttttttataagaagatgtttacttgcttaaatcctctttcaattttttagcgccttcctctactttggaagctccttttgctgctgcatttttcacatcttttcctactttatcagctccttctttaatgtcctgccctgctttctgaagatcctgtttcgttttgtccgcagtagcatcaattttattttttgcatcttcggcagcgttatcaatcttttgtccggcagcatcaattttagcttgggtgttttctttcacttcattaatctttgccgaatccactccaattccgttttctgagacagtagtagtggtagtggtcgtagatccgtcaggattttcaacagtttcagtttttgatgtagactttgtacatgacacaaccacggctgcgatcatcagtacagataaaatgctttttttcatactttataattttttttaaaacgtttttttgtgatttatattatgtagattttacttccgcagaaggctcagatgttttctttttctcctcatctgtttttttcttttcttcatctgctttctttttattttctttctcaagctcctctttcagcttcttttcctgctcctgaattttcagtgcttcttttaatgaatcctgatactgttttgaagacatcctgatctgtcttgcaacatctacagaaatcgcgccattcgagaaagaatcgattgcggtggtatcataatttgctttcgggctgtctgcggggtaaaaatctgccggttctttttttgaacaggaaatcacaactgccgagaaaataatagctgcaaaagataaatttttcatggaactaatttaacagaaattctgcaattacaggataatgatccgataatcttacagaattatccactttatagcttaaaggaataattgattttgaactgaaaatataatcgattctcaatggaactttataatcgtgaaagcttgaagagctgccgtttcccgctgctaaaaaagcatcctgaagatcttttcccagattataatattcgtaagaattgggcacagagttgaaatctcccgccagaattacaggatacggcgaaagatctacagcttttcggatttttttaatctgatcttcgtgtgctttaaaggtaggaatcatgtgcgataacaatgtattgatttttccgccttcctttttcagcccatcgaactgaagcatcgatttatgcagtctgaaaggctcaagataaacattcacaatccgaacgattttgccattgatatctacatctgcatagaaagaatttcctcgcgatttatctgtgattaattcttcctgtcttacaattttatgtttggtttttaaaataaccgaaggatatttcaccagatcctgtctcaaggcacggttggtatctttttcctgaaccagaatgatatctgcattctgatcctgaatatattttttcactttatcccagccaaaatcgccatattttacattaaacgtaatgacttttatatctcttattgatttctgactttctgctttaggcgtaaaattgatccatcttcggataggattataaaataaaaaggttcccaaaacaaatgcaatggcaattttttcttttctgaaaatccagatcagtgtaaaaataatatgtaatgaaataagatagggaaaccccagagaaagaagattaagatttccgaacagattaggcggaatccatgcgttccccaatgtacacaggagtaaaataccaacaataatatggaaaaataacaatacttgacgcggcttcatgaaaacagtctaagggatatagagcttttcagcaaaaatcctaccacacgagaaaaattaacggtttttatgatttaattactgagcttaaatgtcgctacaacaggataatggtctgataattttgcagatcggtcgaccttatagctcaatgctttaatagattttgaagtaaaaatataatcgatcctgatcgggaatttataatcatggaaactggttgcgcttccgcttcctgctttcataaaagcatcttcaagatcttttgacaattcataatattcatacgagttaggaactgcattaaaatctcccgccagaataaccggataaggcgaactttcgatgctttctcttatcggaacaatctgctcctgatgtattttgaaggtaggaatcagttttcttacgatatctttcagtttctgctcgtcttcttcactgtcgccgttcagttttaccatatttttatcaaatctgaaaggctgaagatagacattaatgatccggtaggtttttccattgatctcaatgtctgtctgcgttgcattgccattttcatattcgccatcaagcaaatttttctcagcaatgactttatgttttgtaaaaacgcttgtaaggagggttttgctgctttgcttcagatctttaaaatcgtattttttattaaccatctcctgaaacagaacaacatccgcatcctgactgttgataaaattttcgatattttcttttcctaaaacaccatttttaacattgaaagtaacgatttttaaatctgttttgtcatcttttggctgagaaaaattgatccagcgtaaaacaggattgaaaaacagcagtcccgcgaaaaaaaagacaaaagctcttttcttccaactgatgatccagaaaaccgtaagcaaaatgtaagcaattatcaataggggaaaacctaaagaaagcaaattcagccaaggaaatatttttggtgaaacataggcgtttattaacattccggataataaaagaaatattccggtatgaaggatgagaaaaataaggcgaaggattttcaagaggttttaattaaatctgtacaaatgctttctccaaattcttgccagaataaaacctacgatcgcacctccaacgtgagctaaatgcgcaattccgcctccatttccaaaaacacccaaataaatggagccaataataacgactggcaaaacgtattttactttaattggtattggtataaacattatcccaatttttgcttcgggataaagtgttgcaaaagctgccacaacgccaaaaatagctccggaagctccaagcatacgaccaaataatattgagtttaatttatctaataactcattacttccgatggcaaccttagaagaaattaagtaatcctgtggattattaacgtaatcttttacattaaatccaacgtcttgaagttcattataaatcttttgatattctataaattcccaaaaattaaaaagaaaatatgcacctaaaccactaagaaaataaagaattaaatatttcttttcacctagactttgttctaaaataggtccaaaactgtaaagtgttaacatattaaaaataatatgcatcaaaccaataccgtcgcctatttgagcgtgcataaacatgtgagtgacaatctgccatgatttaaagaaaggagaataaggaaaataagctgatagataaaaatacaactcttctgaaaatatcaaatttgatattacataaattacaatattgatgatgattatatttctcgttatcggaggtatactgttaaacatagtttctaaaatttgtttttaaaatcattaaacggaacttcgtagaaacatctttttccgttgggtaaaaattccggaaagcccaaagcggtaaaatccttgataagctgctccgcatcttttttgtatatgaaatcgaatcttgatttcgactgcagtttgctccactggttctgataatactgcatgaattcttcctcagacttatattccagaatttcaaaaaggttttcaagaaacttcatgacctgcgtttctttcagtccttccggaaccgcatctattcttaacacactttcgtgggcaatgctcatttcaaaaccaagctccggaagatattttttaatggagttatatttcgccttttcaatctcattcatatgatattcgagagaaaaaagcagagcatgaccgttggttgttcctttttttacgggttttgtattttcagaaaccacaagtctgtgcattcttcccaaatcgagcattaaagtttcatcccctttgttgaacagccagtatccgttcggtaacctcatcagatcttcatcaaaatcttcatcttcaaacagattgatcttggaaggttctgcggtaatattctgatggtacatttccgtaagattctgaatttccgcctgcgcaacttcacgttcttcaataaaaggattgtagtctttatctacgatgatttccggcattttcagcgttgtacctcctccactgtttcctttactcgggaacgttttgtgcataatttcatcaaagtgaggatctttttcaaaatccagacttggagaaacattataaattcccagagaacgtttgatggtggaacgcaataaagcaaagatcagatgttcgtcttcaaactttacttccgttttctgcggatggatattaacgtctattttttcaggatcaatgtctaagaaaaggaaaaacgtaggcacataacccggcaaaagcaatccttcaaaagcttcctgaacggctttattgaagtatggacttttaaaatatcttccgttgacaaataaaaactgttctcctcttgtttttttcgctccttccggtttggcaacatagccgtgaagcttacaccagataatatcttctttgatgggaataagctgcggctgcagttttcttccgaaaacatccacgatacgctgcatctggcttccttttcttaacctgaaaatcggctcatcatcatgaaacagggaaaactcaagcgtttcgtgcgctaaagcaactctttgaaattcatcgataacatgtcggaattctacattgttgtttttcaggaattttcttcttgccggaacgttataaaataagtttttaaccagaaaattagaaccttcagccgtctgaacaggatcctgaaactggaaaaccccaccttcaatgtaaatatttgttccgatggtagcgtctttctgtttggtttttaattccacctgagaaacggcagcaatcgaagccagcgcttcgccgcgaaaacctttggtagagattttaaatatatcttctgttccccggatttttgaagtcgcatgtctttcgaaagccattcttgcatccgtctcagacattccttttccgtcgtctacaacctgaatcagattttttccggcatcccggataatcaactcaatttttgtggcatctgcatcgatggcgttttccaaaagttctttcacaatggaagccggtctctgcactacttctcctgccgcaatttggttggctacatgatcgggtaaaagctgaataatatctgacataaaaaaacgtaaatcaacttacaaaaatagtcattcaaaataagaataaaaactataaacttctgaattaaaattaatttatcaacatatcaacattccagccatgcttcagattcagacaaaatgtctcgttatcggggttttcataaaaacacaatcccccaattgcgttatacaattagaggattgattcacagctagtttacacaaaattaatactgatatttatatctcttatttaacattgtctgtttattcagatccgttttacgaaaagtattcaaaatgttatcaagaattttgatcttttacggtaaacttttacccttttcattcatcaaacacaagctttcttttcttgtctcttttctgttctttaatcaccggaattccgtggattttatcataaaaatatgccatcagattcggtttcttataaattctgctgtaccggtatttcgtattgaaatgtctgatatgaattttgtacgcatcataaccaatcaccaccagcaaacacagactgattacataaaaaactctgaattcaagataataataggttaaccctgaaaaaaccgcacccagaacataggaaatcatgatgctcatcaacagttttgctcttccgaccagttcaccgttctttctgaattttttctgcgtaaacatggagaataaaatcccaagatcggtagtggtaccggtaaggtgagttgtttttaccgagaaattagaaatacttgccgttaaaccattctgcagacccgttgcgaatagcattaaagccaccagatattctgtttcttccagcgttttccggtaataaaactgtccgtagattcccacaaacaataaacaggcaatttcaagaaccaacggcattgcatgggcgaaatatttacttttctgattgaatgtgatcacaataaaattcgacacaaatcccccgaaaaagaacaggaagatccacattcccaccaccgcaacctgcgaccagtttgccttgctgatttctgccgcaagaatagcataatgtcccgttacattggaagtaaaagagagaaatatcaacagggaagcaatgtttatagtacctgccgtaaaggcagtcagcgttcctaatctgatgttgtctcccaacgttctgctgttactataattccttagcatttttctaaatttttaaagttctttgatgttaagcttccacaaagatttccgccagtcttcctttttccggaaggcttttgcgaacttcaaccgaaatttcctgagatttcaggtctttacattttctgatgtaaggaataagatcgaacttaccatttcctttgcttttaatagaaggagaatagtatgcttcttcaatattttccgctttcacataattattgaatgttctctggaaacttcccgtgaaaatatcgcacacaatcttattgatcaggtgaggatatttattcctgataatttcatacgcatcgcagaattcctgcggtctgattttattgaaaatggtacttttcgtattaaaaagaagatctctgatggaatctcccatatcataccccgaaaccaaaagaatgttatattgattctggtcttccgaagcgtctttttctctcattacttttttcagaatgttcaaagattcaagagaataatccgtggctattaaaatcgtcttgttcatattaatgagatttagatttgtatttattcttttttgatgatacaaaactaaaacgaccaaattagaacgtctttggaacggaattaaaatgtgattaaagagattaaaatacgattagaatctgttaaaaagaattaacagtttaaatgaaaagagtgaaatgaacgatgattatattagatctcttttccgtctgtctgcatactgtagaaattcgggaaacgcaactgaacggtcgttccctgattttcgtgcgagcttacgattaattccccacgatgtattcttacgatatttcttgccaatggaagtccgattccgtagccttcgtaatttttggtattggaagctctgaagaaaggatcgtaaattttattcatttcctgtccgggaattccgatgccgctgtcttttacaataatgtagacatccgaatccgttgctcccaaagaaactttaacctgctgaaaattagaatatttgcaaccattctggataatattggcaaccgcaagatgcagcaactgttcattgccctgaactttcagttttttaggattatccggcaacatactgatatcgagatagatattatttctggaatctattcttctgagggtttcaattacatcccaaagcaactgatcgatccgcactttatccattttctggattttgccgtcaaatccggtctgtgcgatcatcagcaaagccttgatttttttgtctaatttttcggcttcgttcagaatgattcccaaagtttctttatactcttcattggttctggaaatcgaaagtgcaacatctgcttcacccataattgatgttaacggcgttctcagctcgtgggaaacatttccgatcaggtgattctgggtttcaaaagaagtttcgatgcggttcaacattccgttgaaagtgtcgatgagttcgtttaattccttattatcgggttgtggttccagacgcaaatgaagattttctgagctgatttcctttacttttccggtaattttaaggatgggcttaaataacgttttcgataaataaaaagaaaagatcatactgaaaaagagcgaaagaacgatacaggtaatgagggttctttttaaaaacccgagatagtaaaccacataatgatttttggcagatgcgatggcaatataatttttatcatcgtgtttaaaagtctgcccgatgtagtaaaattccttgtcattaaaatttgcttctccttttttaacaatgcttttaaaaaaatagtcgggaatatgaacctcatccgaaattttcttaaagtttgagtcagccggaattgcaaaaacataatcccgctccatcggaagctcttcatcgtttaatccgttcagaatgtaattttccggaagatccaaattgtctttgcctttttcgatctgaataatggtggtggtacggattttcagcagctcgtaaaatctctgatgcgaaaagttgacaattgaaaaatacaccaatccactgaacagcaatatgatggcggtaaaaaccaacatcagaagcaccatcgttttggtctgatttgtgacaactttgttaaacatctttaagattttttcagaacatatcccattcctatcaccgtatgaatcagcttattatcttcctgattatcaagcttttttcgcaaataattcacataaacatctacaacattggttcccagctcataattcacgccccaaaccgcttctaaaacttctgttcgtgaaattactttttcaggattgtttaaaaagtacaaaagcagcttgtattctgtggaagtaagtgaaatttcttcgcccgcacgcgtcacttttttggtataatcatttaaaaccaaatctgaaaactgatacacatattcattatcttcttcatcttcagtaatttcatgctgatttccgctattgctccttctcagtaaagatttgatccttgcaacaagttctatgaatttaaaaggctttacgagataatcgtctcctccgctttccaagcccaaaacaatgttctcagaagttcccaaagcggttaagaagagaatcggaacattctgattggttttgcggatttctttgcagacatccagcccattcatttccggcagcataatatcgaggatcaccagatcaaaatcattcgactgcaccaattgaacgccggttttaccgtcaaaagccacagaaacttcatatccgctttcctgcagcccttttttgataaaggacaccacactggtttcatcttcgataaggattattcttttcatttgaaatttggaattagacaaaaatagggaaaagatgggacatgaataaaggaggaaatttaaaaataaaaaatcctcctttatcaaattttaaaaaaaattatgttctattattttctgttaatcatcatccttgaagccagaatatgttcgcaggatccctgtctcaaaccgtttgctctataaaaaccgcattggcagtttccgtcggttagtcgttggtctttatcaataaaagcttccgtctgataggttacatagctttcctgaatggttccctgaattttaagaatatcattttcagcgctgtaatttatttttactttatcttctgcgatcagttggttcgctctttcttcctgcggactggagaaccgcaaccgtttcatatccaaaggctcctgagtgagctcgcgaactctgtataatccgagattaagatcataaatcactcttcctgcctgtgtataagatgtcagtgaagaagaaattgttgccgtatcaagatttaatttttttgaaagttcggcgggagttccaaaccaggtttcttttaatgcattaaaaactttttcctgagtaagcagatccacatttcctctcggcgccataagatcaaaacttcctgctctgctccagtcatttgtcgtccaccctgaaagtcccatagtgaaagccatatctcccaaatctgcaatataaaacgaaggcaatccgtttcctaataagaccactctgaaatttttagcaatcgggattagtctttccagaatcagcaatctaaactttttgcatagtccccaacttttgcgattgatcgcatttttcatttattttcaaagtgttgtgaccatgttgtgcctgataaaaacaaaaaaacctgacaatcaaatgattatcaggttttctatgtaccccaggcgggacttgaacccgcacgccaaaagaggcacaggattttaagtcctgcgtgtctaccagttccaccaccagggcaggcgtggagcgaaaaacgggattcgaacccgcgaccccaaccttggcaaggttgtgctctaccagctgagctattttcgcatactgtgcggatgaagggactcgaacccccacgcctctcggcaccagatcctaagtctggcgtggctaccaattacaccacatccgcgttgattatgatgaaaacttattttttaaaagaacttgtattcgttttgtcgttttcagtggtgcaaagataggataaattcttttacctccaaacttttcaggaaaaaaaattaaaatttttacattttttttttcgcgtagcctttattacgattgattttcttacttttacagcgttaattaatatgatatggaattacaaggaacggtaaagaaaatatttgatgctcagacttttgcgagcggtttccaaaagagagaaatggtgattctgacgcaggagcagtatccacaaccgataaacatagaatttttgtctgataagatcagtttattggataatttaagagaaggagagaatgtgaaagtaggaatcaacatcagaggaagagaatgggtttctccacagggcgaaacaaaatacttcaattccattacaggatggagaatagaaaaagtatttgataatgcttcagaacctacacaagctgcgccatcgcagtctgcttctccggtttccaacgagaacccttttgcagatgatgaagatgacgatcttcctttctaatacaatagataacactgaaaatacaaatcctgctttatcaagtgggattttttttgaaaatggttcgattagacgaaaacgaaatttcatttcccgatccacaggtttatgacggacacgaaggagtgattgcttttggcggtgatctttcgatcgacagagtttggtttgcctatcagttgggaattttcccatggtataatcccgatgaggaaattctctggtggtgtcctgatccgagatttgtattgtttcccaaagagatcagagtctcaaagtcgatgcgaaaaattctcaacaggaatatttttactttttcggagaacaaaaatttcagagaggttatcagaaactgtcaggaaattagcaggaaaggacaaaccggaacatggctttcggatgaattaatggaagttttcatcagacttcatgattacggactggcaaaaagcattgaagtatggcaggatgaagaactggtcggtggtttttatggtttacagattggaaatgttttctgcggagaaagcatgtttgccaaagtgagcaacgcttccaaagccggatttatttattttgccgaaaaatatcaaaacagccttgaacttatcgattgtcagtctcacacagaccaccttgaaagtctgggagccagaatgattcctaaaaaagagtttttaaaaattttatacgaaaacaatgaacgcagataaagaaaaatggattcttctggttgtactcagtatcatttggggatcgtcatttattctgatcaaaaaatctctggagcattttagtccttatcaggtcggagctttacgggttttaattgcaggaattattctgatgcctgttgcaatttcaaaatacaaactttttcccaagaagcatttaaaatggctgattttagctgcttttacggggaatttttttccgatgtttctgtttccgattgcagagacagaagtaagcagcagtattgcgggaattatcaattctatgatgccgattttcgtgattattgtgggcgctctgatctggaagtttgaaacaacaaagaaacagcttatcgggactttaataagtttcagcggggtctgtttactggcttttggcggagacggagaatacggaaaatttaaactgattcctattttgctgcttctgcttgctactttttgctatgctttaagtacaacaacggtaaaatccaagcttatggaagtttcgtcaaccgttttatcggcttttgtgtttggctttgttttattttttccttcgttaattgctttaacatttaccggatttttttcgacattcagttttgatgaaagtaatctgacgggactgttttttgtaagtcttctatctattttcggaaccggattggctatgatgatgaattaccgtctgttgaaagtttcaacgccattatttgcatcaacggtaactttactgatgcctattgttgcaattatctggggaattctggatggcgaaaagctttctgctttacagtttgtgggggcaagtatcattattgccggactcatctttttaaggacaaaaacaaatgttatcaaaaaaggtaatgtactgaaaaatagttggtgaaattcaggatatattttaataaattatgcacgttaatccgaagaggacaaaagcactggtggagatcaacttttcagcaataggattaatgttnnnnnnnnnnnnnnnnnnnnnnnnnnnnnnnnnnnnnnnnnnnnnnnnnnnnnnnnnnnnnnnnnnnnnnnnnnnnnnnnnnnnnnnnnnnnnnnnnnnnaatcacgggcgatatcaaagtatcattcgagcgtctgtctttatcctgctgcttttgctcttctggttaatatttttaactaagttatcaatctgttttgtttaatgcaaacttaccattgagcggcatgtctgagctcttttcgtttttttcggcgcggcagcttcgctgccgcgccgaaaaaaacgaaaaagcgagtagcgaaagcgcgaaacagctccttattataccactgcataaaaaagccccaaacttgcgttcagggctgtatatttttagaaatccttccggttatctttcatcatcgttgtcgtcctcatcatcgaaagcatcgtcgttgtagtcttcttcttcctcatcatcaaaagcatcatcatcttcgtctgcaaagtttccggtagctccgaagtcatcgaacccgaaatcatcatccattaatggcattgccgatttctttttggatcctccacttccgtttttgctaggcgctttcaaaggaacatttccaaatctgtaaaccgtgatcgggtaattaacgccttttgtttcgtcgataacttcaaccaattcacagaaaaattcccaaaggtcaagaagtccgtactggaactgagctttatctcctgcattttcgaatgcctcatcgatgtacacatccgacataatttctccgtcgccatcgtcactcatatcttctagcggaacgctttttacaattgttccatcttcttcaagcagattaaaagtggaaagctcatctccctgcaagctgaatgcactcttaatgcctaaatgtaagttccaaagcgtctgtttcccttttacttcgatatcccggaaaatatcttcttttgcatctaatattacgcggattttataaaccatcagtttttaaattactttttttgccgttgttattatgataaatctctgttgcaaatataaaataaatgagatgtgacaaaaaaatatttcatcattttttaaaatatttttttttcatacattttgcaaaaattatttacttttttccagcatgaaactgaatttcgtaccttcaagataaacgctttccacagtgatgttttcgttgtgcgcttcaaggatatgctttacaatggcaagaccaagcccggaacctccttcccttctgcttcggctggtttccacacggtaaaatctttcaaaaattctcggcagactttcggatttaatgcccattccgttgtctatgacctcaattaagactttatttttaagaacgctggtttttaccactactttcgcttcctgtctgttggcataatgaatggcgtttgaaattaaattaataaagacctgtgagatcttctgcttgtctgcctccacaaaaatctgtggctgcagggtctgaatctgcatacttgcattgtgtttttccgcttctaagtcaagaagatcaaaaatttctttgattaacagattaacgtcaaatcttgagacggtaagattaatttcgccggcttcaagcctgttgatcatatcaagatccgttacaatggcaattaaacgctccaccgatttatcgattctttccagatatttatcccgaatcgtaagattatccactccgccgtcgcgcagcgtttctacatatccctgaatggaaaaaaggggtgttttcagttcgtgggaaacgtttccgatgtattctttacggtaactttccatttctttcatcatatccagctcggtgatttttctctgattgaggtctgaaaatctttcacccagttctttaatggtaatattttcatcatcatcatgaacaatttcctgcggcaagagctgtgaaagaccacgaacctgctttttaccgtaataattgaacaacagttctaaaacgatataattgatgataaaaataaggacaagacaaataatcagtccgattttaaaaaatggtgtactgtaatagatatcctttagtgaatcgaaaatgattactaaaagaaacatcaccaatgtcagaagacaagaggcgacgagggtaagtctgtaaaatttcaattttacaaagttttattggttgatgtaaaggtaagaaattgaaattgagtattaaacaataagtttatacccaattccttttaatgtctgaatcgtgttgattcccagtttctctctcagtcttctgatgtggacatcgatggttctttctcccacgatcacgtcatttccccagactttttccagaatttcttctcttttgaaaactttttccgtattggaagccaataaatacaaaagatcgaattcttttttaggaagcagaaactgctgtccgtttttagaaaccctgaagttgtctttatcaataattaaatctccgatttcaattaattttgagttgtctgaaacctgagaagttaactgcaataaagcgtttactttggagatcagaattttcggtttgattaatttaacaatgtagtcgtttgcacctgcctgaaaacctgccagttgtgaaaattcttcgcttcttgcagaaagaaaaacaattaaagttttttgcagttctttaatttttctaagttcctggcaagtttcgataccgtctttttcgggcatcatgacatccaataaaatcagatccggaacaatttcctttgctttgtcgataccttcatttccattagtggctgtataaatgtcgtagccttctttttccaagttgtaagacagaatctctaaaatatccagttcgtcgtcgattaagaggattttcttttggttcatttttaatttttacgagtcaaagttaataatattttaatcactgtttaacaaaacgggtatcgttcacataaagttaacaattatattcttttcttaatgtttagttaagaaaaaattaaatttccctaaaccatttaccccatcaattctttattcctttgcaccgaaagaatatagtaaaaaagaaatgaattttagaaaactgagtatcgcagtattgtttttaacaacatcgggaactgtactttacgctcaagagaccaagaacgacaccgtaaagaaagaaaagaaaatcgaaggtgtagtcattaaaggatctactaaaaaaggaactgaggccaaccttatcaatttacaaaaaaaatctgtagaagttatagagcgtgtaggttctgtacagcttgccaagcaaggtgtaggagatgctgcaacggctgtaacgaaagctaccggaacaactaagcaggaaggaagcggacagattttcgtaagaggtcttggtgacagatacaacagtacaacgttaaacggattaccaattccatcggacgatccggaatacaaaaacatcaatcttgagatcttcaaaacttcaatgattgaatatatttctttagataaggtgtataatcctaaaatgcttggtgatttcggcggagcgaatgtaaacattgtttctaaggagcacaccggaaagccttattttaaggtaggattaggaagcagcatcaatcttcagacattcgataaaaaagatttcaaagttcaggacggagcaccgggattcttcggatacaaagaaactactttcaccaaaggaaatccttatcagaaatatcctttccagacaaactggaatttcaagaatgccagaaatccttttaatacagatatgaatattgaaggtggggcaactttcggtaagctttcattatttggttacgcaggatttgaaaattcttacgaatacagccaaggacaggaagggtattatttcttcgataacacgccaagtaaaaactatacgaatgtagaacgttttaattataagacaaatactactgctttagttaatgtaggatataaaatcaactcaaatcacagaatcagctttacatccaactacattcactcttcagatcagtcggctaagatttatcagggatattcttatgatgtagacagaaatgtaatcatcaacagaggggataataaaattaccacaacctgggtaaatcagttattgggaactcacaaactgggtgaaacatggtctgcggactgggctttaggttataatatgcttaacagcaaaagaccggatcgtcttcagaatacgatcgatgccacaaactctcagcttattgcaggaagcgcgatcaacaaccacagatattttgatgagctgaaagataatacggttttaggacacgcttatcttaccaagacttttgaaaaattcaaagtaactttaggatacgacggacagtataaagacagaaggtttgaaaatacaaccatcggtatgaacttcagcaatgtggtaccagtagatcctaacaatatcgacggatatattaatgcaggaaacaactctttattctcttacattactttccagccgattgataagttgtttaatcctttttattatactgcaaaacagaatattcagtcagggttagcgaacgtggatatcacgctttcagataaattcatcgttcaggttggtggtcgtttcgattatatcgatatgcagatgaagtggctggatccaattgcacaggacggtaaaaagaataagcaatacaataaattcttacctgctttaaatgctaaatacagcgttaatgacaagcagaatttaagattggctttctcaaaatcatacacattaccacaggcaaaagaaatcattccaattgcttattatgatgtaacgacaaatacttacggaaaccagttcctgaatccttccgacaattacaatgtagatcttaaatgggaaatgtttccgaaatcgggagagcttatctctgtaacggctttcggaaaatacatccagaatgcgattgcaagaacaagctatgcgagttctgcaccaagtgacatgacgtatttcaacatttcagattggggatatattgtaggagcagaagctgagttcagaaaagacctgtattcgtggaataattctaaagtgtacactttccttaatgcaacttatatgcactctgagcaggaatttaaatctgaaaacgaaattgctaaaaataacggaggtaaaacaatcgtattcaacactccgaaagataaaattcagggagttgctgattttattgccaacgtaaacgtaggatataactataaatggaataatgtaaacagcttagactttgtagtttcttattctcatatcggtaaaagcctttattctgtaggaacaggattcatcggaaacttctatgaagtaccgagagatattctggatatgaatttaagctttaccttaaataaaataggaatcgggatttctgcaaagaacttactgaatcctcactttaaaatcgaacaggaaaacaccactaaaacatttatccacaaagactacacgaaaggtcgtcagttaggattaaatctatcatataaattttaataaaaataaaaatctataaaaagttatgaaaaaaacaatcttaaaagctgctcttttcttctcgttaactgcggcattctcatccgttgccgtttcgtgcagcaactctgatgatgatactacagatacaatctcaacaatcgacccgagcaatttcaaaggaaatattgctgccggaaccactataacattagacccgtcaaaagtatatacaatcaccggtaaggtaatggtagaaagcggtgcaagccttatcattcctgcaggaacaagaattacggtagcggaaggtgcaaactaccttatcgtagacagagggggtaaaattttcgtaaacggaacttcttctaatcctgtaatttttgaaggtactacgcacaaacaaggacactggggaggaatcgtgatcttaggtaacgctcctaccaacagaacttcttcaggtacttctacttcagaattgggagatttaacatatggtggaacaaatactgctgataattctggtatcattaaatatcttgtaattaaagacagtggtttcaaatataatcctgaaaaagaattcaacggtctttctcttttcggagttggtagtgcaactacaatttcttacgtgtatgtaacaacaggtgcagatgatggtattgagtgtttcggtggaaacgtaaatctggatcacgttgtggtaaccggtgttggagatgattctttcgactggacggaaggatacagaggaacagtaaactacctttatgctgccagaatgaaagcataccagactgctgctgagccaggaaacagaggtatcgaagccgatactcaggatacaaaccctaatacaactttcggaaacggagcttctaatccggtgatcaacaatgctactttcttaggaaacactgcaggatcagaatcgcaaggaatgaaagtaagagcaggttctaacggtcagtttgacaacatcgttttagccaactttacaacaggtcttgattttgaaactgacagaactttaacgtggtttcagggtgcttcttacatcaaaaacttaagatttgtaaatgttaccacaaaatctaaagctaaaaatacagcgggaactgcggtagacatcacttcgatctttacagaaaacaattctgcagtaggtgcaggtaacggtactgctttaccagactgggctaaaggatggacagggctttcaagctttgatactacagacgctatgaattaatagttagtaattagtttcttcatatttaattcaaaaaacggcatcggaaagatttttccgatgccgttttcatgaatagatacaattttatattcattaaaatacaattgggaaaataagaagaaaaatggtaatttggtcttttcaaataaagatcttaaaataatctgtttgaagaagtaaaatttaaaaacattatgaaaaaccgctttcagcatattttagcagctcttattatcagtacatcgcttgttgttcattcctgcagtaaggaagatgaagatgtagccaccattgcggtggtaggaattgcaaaagatccgagtaattttaaaggtgaggtttccaatggacaggttgtaactctggatgccacaaaagtatatgtccttaacggttcggttaccgtaaaaaacggaggaaaacttgttattccggcaggaacgagaattgttgccacagcgggtgcagcttcttatgttttggtagaacagggcggacaattatttgcgaacggaacctttaattctcctgtttccttcagatcttccacagaagcttcgggaagttggggcggtgtcgttatctgcggaaaagctcctgtaaataccggtacaaccaacgcttcggaaattttaaattccgcttacgggggaacttcggcaacagataattccggttctctgacgtatgtgaaaattgaaaacgcgggagtgagtttttcaaccaatgtaaaattcaacggactttctctttttggggtaggaagtgatacgaaggtagaaaatattgctctgattaatagcgcagaagacggaatccagatgtatggaggaacggtaaatctttccaacatcgtctccataggaaacgaagatgatgcttttgtatggacagacggatggatcggaaccgctaccaatatttttactaaaagaaaaacaaacggctctggaaatgccgcaataaaaggacttaacaatgcttcgaatcctgctgcaactccagtttccagccctactgttaaaaatgtgacgctcttaggcggaacttcgggagaatccaaagccatcagattatattccggaacgtatgcgagttttgaaaatgtagtggtttctaactggacccacggattttctattgaaagtgatccgactgtaaattatattaacggacaaagtaaaattaaagatgccttttttgatacgaacgttacgaataaagtaaccgtgacttccacttccggctctacagtaacgcttttaagcaatacctacaacgagaaatcggatgctttaggtgcaggaaacaaattaggaaatccggcttgggcaatcggttggtcttctttacaataaaaattaattgtataaaataaacaatcggcttcagatttatctgaagccgattctgtttcaataaaggacagaaataaatctactccttcaatattgtttcaactaagaatattcgaattttcttactgcttccagcgtcatatcaatttctttgtctttaatcgcatcactgatgaaatacgtttcataaccgcttggcggaagataaatcccgttttgcaacatctgatggaagaaattattgaacaatgcatgattggcttcctgagcttcatcaaaattagaaactctgttaatatggaagaatacagacatcatagatccttttctgttgattttgtgggcaattcctttttcgtttaaaattttgccgatttcaaaatctaaggtttctgttgtttttgccagtctgctgaagaattcaggatcatttttaatcaactgtaaagttttcagtccggctctcatggctaaaggatttccgcttaatgttcctgcctgataaacgcctccttttggagccagatgatccataatttcgtttcttcctgcaaaagcacctaccggaagtccgcctccgatcacttttccgtatgttaccaaatctgcttttacgttgtacagttcctgagctcctccaaaagctaatctgaaacctgtcatcacctcatcaaaaattaataaagctccgttttcgtcgcagattgttcttaatttctgaagaaattcattttccggcaaaacacagcccatatttccggcaaccggctcaataattaccgctgcaatttcgccctgattatgtctgaaaagatcttcaacctgctcaaaatcattatatcttgccagtaaagtatcttttgccgttccagccgttacgcccggagaattcggatttccgaaagtcgctgcaccactacccgcttttatcagaaatgaatctgaatgaccgtgatagcagccttcaaattttataaacttatctcttcctgtaaaacctctcgccaatctgatcgcactcatacaggcttccgtacccgaagaaaccattctgatctgatctacattcggaacgttttctgtaatgaattttgcgatttccgtttccagttctgtgggtgctccgaaagaaaatcctttttcagcctgaattttcagttcttccaaaacttccggatgcgtatgtcctaaaattgcaggtccccaagaattgatgtaatcgatgtaggtattatcatccgcatccgtaagataggctccttttgcagatttcataaaaacaggcactcctcctacagatttgaatgctcttaccggagaatttacacctcccggaatgtatttgtaagcttcttcgaataaagctgaacttctttggtatttcatatgtcgttgttggctgaaagttgatagttgtgggtttaacaatcaacccacaactatcaaccatcaacaaattttagtttctgggttttttatcaatcaaataaatcaattgtccggcggaaggtttctgtccttcatccattctgtttttagcgtataatttatttaatttaattccgaatttctgggcgatatcatgcatattttcgccagcttcggctttgtaggttgcagtatttccgtctgagtttttagattcaaggaaaacaatttcatttttcttcagaacatcactttcgagttcattccatttcatgagtttgctttcactgatcttgaattttttggcaatgaattctacgttggtatcttcaggaatgatgatgtactttaatccgtcattcggatgactttttattagaatagtattaagaatttctgcttttgttttaattctttccactcttttctgttgctgagcgtaagaagtctgtttgtaaggaacctcaacagttacaggttcttttacttttctggtatacttttccggttccagctgagccatgaaagttctgtcgtctttcagatccggatacagtttcagaacggcgtataaagcttcttttgaattggtattgtcgaattcgtacaatttatacctttcaattttcccgattaatatggaagcgtagcggggatttgttgcataacctgcttttttaagacctgttgcccacgctttgtaatctttcatatccaaattgaaaagattagcgtagtattttcttgtcgataaaaaaatggaatgatcttcatatgactgtcgcggatcgtcgtaaacacggaaacattcgttcggagcgtcatcggtgtgcttcattgtttttccggtccagtcttctttacatttaatcccgaaatggtttttgccttccagagccaatcggctttgtccgcctcctgtttccaaaagtccctgtgcaagcgtgatagaagcgggaattttatatttttccatttcttccactgcatattttgcaaatttctggatgtactgatcttcggttgcccaggtctgagctgagaattttgataaaactaaaaggcttacgatggtgaaaagtcttttcatgtttttcaatttaaattatataattaaatttctgttctgtttttctaaaagcaaattggctccttcaatcccctgcaaaccgccggtgtgaaagcacaaaattttgctgttctcaggaaaataatcttcatctatcaattcgaaaattttctgcatcatctttcctgtatagaccggctccagcggaattccgtatttctctttaaaatcattaataaaacggacattttcgtcctttattttgccataacctccaaaacctgaatctattagatcaaaatttttcttagaagttagttcaacgattttattttccagcgaatcgtcgtcaaccgctttaaatcctataactttctgattttcttcactgaattttaaaattccggcaaccgttcctcctgttccgactgcggtgcaaagataatcaaaatcttttgtatcgtcattcagcatcatttttatgccttgtacagcggcttcattggttcctccttccggtacgacgagcgcttccggaaattctttttgtaaaaattcagtcagtttttctttgtggcgatattcttcacgggttacaaactgcagattcatcccgtttcttttggcaaaaagtaaagtcggattgtcgcgccatttatctttcagctcctctcctcttataatccctaaagtcggaatatctgctaaattcccaaccgctgaaacggcagaaatatgatttgaaaatgctcctccaaaagtaatgatgtagggcttttcaggatttccggacagataattattaatattgaaaaaaagcttccagtatttatttcctgaaatctgaggatgaattaaatcttcccttttcatgaaaagtctcacttttttaccaagaggaatttcctgaatcgggattttttcggatggaacatttaataccatttaggctgaatcttttttacaaaaatagtgttttttgggtgtttagtcttgctttggacaggtgaggtttatcattgaaggtaaggatgggttaattttatttttactttatttcaccaccccgtcaaaaattctttcgaattttcgccacccctccagaggaggggaattttatgccgaattaccggaaatctaatctcccacaactattatccgttaacccttcctgattttaaaggtattttcgaaaactccagaattttcttttcctgagataatttaaattatgttcgttggaataagcttctctttcaaaagaaattcttttataagcctgataactgtccttcagtttaaaaaaccagtaataatattcgattacataaaaaatatagaagaaaatgatgagcatttccaactgttgtcttaaatgtattttttcatgattaatcaatattttatttttcttatcttcgggattcctaatgaagataaaaggaaacagagcgatgccgttgatttttaatttttttaaaggcttttggcatataattatcatactaacaaatataaagttttttgacttagagatttaacctatggcactttttgacatcaaagaaggtgaagacttttactacaacgagcagggttataaagtttttacggaaaagtttcatctgaagagaggacattgctgtaaaagtggctgtagacattgtccttacggatacgataaaaagaccgatacatttattaaaaacgataaaaaaaataaataaaatgaagcgatatatcttcttactgttggcttcggctactttgggtttaacgtcttgcagtcctttcaacgtacgttctgactatgcggacacggcaaattttaattcatacaaaacttataaattaagaattgatgatttaaaactgaatgatattgataaagacagagttttgaatgaactgtcgagacagcttcaaagcaaaggtcttcaatccggagaaaatcctgatctgattgtaaatgtaaaagccaaccataaaaaagtaacggacgttaccacgacttcaccttacggagcatggggttggggcggacctttcggatggggaatcggcatgaacagaacatggacgagcaactataatgaaggagccattattgtggatctggtagatgcaaaaaccaacaaactggtttggcagggaatcggaagcggaatttctgttgacagacctaaagcgaaacagaagcaaattcctgagatcatggcggaaatcatgaagaattatcctccgatgaaataagatataaataaatcaaatatataagaaagtcaacgcagtaattgcattgacttttttattgaattaatgatgtctggttcctttatgataatagacaacgttttgtggatgggcatcgtaatttttctgaatcctttcattccggaaatttcggtttacaggtttttctgaaatttcaggggttttgaaatggacttcttttccgtttttgtacattttaccgtcagcggttaaataagtttcatccttttgatagactttgccgtcttctccagtaatagttcctgtttcgttctttgagtttttcatctttcggctaagataaaccaatgttccgccggtaattaatgccagtgcgatttttattttgtgattcataatggtgatttataaagaacagcacaaaatatctgccaaagcgcaggatgaaaattatcttttttaattcataaaatctaaaagagaccttcaaaacaggctcattctcaacaaaaagcaaagatttaacagtagatataattctatgcataattaaatttaacaattccgtaattttttattgataaatttatagtaatcttaaagtctaaaatcttgacatgaaaaaacatttactaatggttgtatttgcttctgttttagcaaatgctcaggctccttcgggatactacaactctgctaacggactttccggagcttcattaaaaacggcattaagcactattatcacgaatgggcatcttgacaaaggctacaacggactctggacggcgtacaaaacaaccgacatcgacaagaactatgaaaacgacggctctattctggacatttattcggaaaaacctgtgggtacagatccttacaaatttactccggttaccaaccaatgcggaacgtattcggtggaaggaaactgctataaccgtgaacatattattcctcagagcttttttaatgaagcctctcctatggtttcagatattcattttatcagagctacggatggaaaagtaaacggaatgcgttctaattatcctttcggaaaagtgggaactgcaacatttacttcaaaaaacggttctaagcttggaaattctgtttcttccggtttctcgggaacagtgttcgagcctattgatgaatttaaaggcgatgtagcaagaatggtattttattttgttacgagataccaaagcaaactctccacgtttacatccggaaatatgttgggcagttctgcttttccgggtttgcagacttgggaactgaatgttttattggcttggcataatcaggatcctgtttctcaggcggaaattaacagaaacaatgcttcttatacttatcagggaaacagaaatccttttatcgataatcctaactacgtgacccaaatctggggctccgcttctggttccggaggtacatctactccaccaagctcgtcaagctgcggtaacgaaacatttgaaaccattccttctgaaagttcagcatcttatttaacaagaacatggacaaataatggtattacatggacagcaacggatgcaagaacagatcagacgatttccaccaaagcaatcacgattagagacggcgcattaacatcaagcagttcagccaacggaattggctcattaacggtaactacccaactgaaatttacaggttccaatgacaccttcaccgttaaagtaaacggaacagcggtaggaaccgtaccttacaatacctctgcaacaacaaccactatcagcaatattaatgtttcggggaacgtcgttataactttagaaaacaattctacgaccaaccgagttgccatcgataatctgagctggacatgctattcgggaacggcaagacaggctccaagtatttcttctgaattaatttcagatccgaatacgttacagatttcccctaatcctgtttccaataatgaaatttttgtaaaaggggaaacgcagaatattaagaaagcggagatttacaatcttcacggaaaagtaatgcagacgatagatcagccttttaaaaacggtaaaaattctattaaaattaaaaatcttgagcagggaatttatattttaaagttagatgcttcttcattgaagtttattgtgaaataaattttcctttaagaaataacaaagccttctctcaattgaaagaaggcttttattttttaattaataagaaattactgtcccatcaattctctcattctttcctgcatcagttgcgggtctttcatagcgtcccatccaagggtagagatcatgacaacaacgtaaaccacgtataaaatacttaatacaattccgatgattgccattatttttcctgcattcaattgtccgtaatttgaataagccgtcggattttttctgtaaagctctccgtcttttttagccagtaccagtgcaatgatccctgcaataagtcccggaagtccgtaacagcaacatccgacaattgatacaattcctaagattaataccgccgttgcgttaggtaatttttgttgatccatagttataatttaattgattaatgtataggtaagtataaatgtttataaaaataagaagtcaccataataactgcattgatgatggcaagaaaaaccaaaatattactgtaattccgttttctgtctacgaaattcagaaagactgttccgaaaaaaagcaataaggtgtagaccgccggaaacatatgaaatgcttctccaaacctgccttcaaaaaccatgacaatagctctctgcgttccgcacccaaaacagtcgattccgaagaatttcttgatgggacaaggcagcataaagtcttctattttcattctaataaagggttatgattctcaaatatataaaaaaattatttagaaatttttgctcttaaatactgaggcggaaagaagcattcttcatccatttcaaaagaaccctgaacggcgatgtaaggatttcttaagctttctctggcgatgaaaattaaatctgcctctccttttcgcagaatttcctctgcctgattgactctcgtaattaatcctactgctcctgtttttgtttctgcctcatttttcacctgtgaagcaagcggaacctgataaccttcgtgaacaggaatttttactccgtgaatatttcctccgcttgaaacatctaccagatctaccgagtggtttttaagaattttagcaagttcggcactgtcttctatttcccagccgttttctgcgtattctgttccggaaattcttacaaataaggcaacgttttcatttaattcttcgttaactgcgtctacgatttcaattaaaaaccgtattctgttctcgaaacttccgccatattcatcggttctgatattggaaagcggtgataaaaactgatggataagataaccgtgtgccgcatgaatttctatgacatcgaaacctgcatctacagatcttctcgctgcctgtctgaaattctcaacctgttctttgatttcctcaatggttaaaacatgtggaattctttcggtcggatgatacggaatcggacttggtgcgatggtttcccagccttcttctatcgggatctgtacattgttccacgtagatccttttcttccggcatgcgcaagctgaattcctattttggtttctgagttccggtgtacaaattctacaattttctggagtttttctgcctgttcgtcgttccagattcccatacagtggttggtaattcttccgcggggttctattcccgttgcttcaacgatgattagtccggttccgccctgcgctctgcttccgtaatgtacaaaatggaaatcgttggctaatccgttttcggaagaatacatacacattggagacattatccaacggttttttaattcaacatttctgaatctgattggagtgtataacattttttgatctgatttttaaaatttttaaagaatgtgatggtgttgcccacctcatgaaaaaaaagtaaatttatccccctttttttaaacctacaatatatgaaaaaagaaactcatatcagttacgaatattttaacaataaaggcgaactgaacgatatagaaaaaaaattatttgcaaaagcgaaagaagcgcgcgaaaatgcttatgctccctattctaattttttggttggctgttctgtgcttctggaaaacggagaaatttataccgggaacaatcaggagaatgcagcatatccttccggactttgcgctgagagaacggctttgttctggatcggggcaaattttccgtctgaaaaaataaagaaaatctttattgtaggcggaccgaaggagttttctgagaaaaatccaccgattccgccatgcggatcgtgcagacagagcattatagaatatgaaacgaagcagaatgaaaatattgaactttatttttccaatcttaatgatgaagtggtaaaggtacattctattaaggatcttctgccgttttattttgacggtacttttttatagttaaaacttgtttaaactaatttcagaattaaccgcaaaagggacaaaagataatattaaagtgaatttccagaatagtcaaagcgctcaaaagaataaaaatcaaagatttttaaaaactattgttttctttttcatttataataatcaactttaaataaaaaatttagtagatcttttgtgacttttgcggttaaataaagtttaaacagacttttaaaatgtttaaataatagtaaataagaattcaggttggattttcgcaaagtcgcaaagttgtttaaaatattatgctttaagggacaaggattttatctgcgataaaatttcatcagcattataaaagaaaatttttaattttctccttgcgtcttaaaagaatagaaattttatcaaacctttcaccttagcgttttcccaacaagaatatttttattttaaaaagtttaaacttctgtctgaatttttatttaagggaaagctttttaagaagggactttctttcatcacataagtcacatgagattttaaatgatgcatatttaaaatagcagaacacattagttttgaaaatctttgattttcttccttagtgatgcttattttaaagtaattaaaaaacttgtttatgctttttaccacaaaagatgcaaaagatttaaacactttagttttttaagtttaatctttcaatagaaaaaaagagcacataagtttaaaaattatttttttttctctttgcagacttttaaaatattttaaatcaattcaataaagtcttttgtcttttttgcggctaaatttaaaatgagttcaaagaaacttaaagtaagattttaatacattttaaataatttttacttaaaataattatttatctttcaatagaatctgaattttataaaaatttttattttctgcggttttattttcctagccaagattgagcggcatgtctgagctctttttttgattcggcggcggcaaaagccgccgccgaatcaaaaaaaagcgagtagcgaaagctggaaaaagctcctgaaattgtttttcgtatgtaatgcaacaaatcattgttttattaaaaagatacttaatgggtattttttttgtcaataaattaaaaaagttatctttgcaaaaattttggtttccattaatttggaatgaaaagggaattgggcgaaaatcccaaactgtccccgcaactgtaaatcgcatataagatttctacgataaaccactgtgaaaacgggaaggtgtagaaagcgaaagtcaggagacctgccaaaatgtaatcttaaaaacattgctttcggaggaaaagtaaaataggaatggcattaaaaagatctttagtactgctttttgcatcatacggttgttttctttacgcacaggagaaaactattgataccgtttatatttttgacaatcagatgaataaggcaaaactttttcatccggttactacaattactcccaaagacatcgaaaaaaattccgctaatctatctgaaacgttacgttttcagtcgcctgtttatattaaggaaaatggccgcggtgcggtttcttcaccttctttcaggggaacaacggcgcagcaaactgcttttgtgtggaatgggattaacatcaattctgttcttttaggacagggagatgttaataatatcgcgattttcggctacgatgcgcttgaagtgaaagctggcggcggaagtgtggtttacggaagcggcgcgataggaggaagtattcaccttaacaatgagctgaaatttaatgagggttttcatgcaactttacatagtgaagtggcttcttatgagacgttccagaattattttaaaacttctttcagcaatgcggatttcagttttaaggcatccggaaattatttcatcagtcaaaataattatgaggttcctgaaaagcagtatatcaaccgaaacggtaaatattttaatggtacagcgaatattggcttcagttacaaaattgcccgaaatcagaaaatttcttggcaaagccagttgtatgatgcggaacagaattatccgatcttcacggaaaacggcaatcgcacgaagtatgcagcgcagactttccgaagtcttcttacccacgatgtgaattcaaaatcgatttcaaacagcctgaaagcggcttacacggaagaaaatttccagtatttcggtgtttttgaagctcctaaaaccagtggcggaacgggaaaaaatctgatttttaaagatgatttcaattatttcatcacgcctaaactgaatgttaatgttattggggagtttcagatcaataaaggagagggctatcaatccggaattgagaatgtaagaagaaatatttattctgttgcaggattgttgagatatttccctacccaaaagctgagactggaagccggaatcaagaaggattttattgaaaatatagaatcgcctttactctattctttttctggtaaatggaaggtttctgactggtacagtttagggacaagtttttcaaagaatttcagatttccttcttttaatgatctttactggaatccgggcggaaacttggatctgaaatctgaaacgtctatgcagactgaaatgagccacgaattggcgttcggaaaattcatgttgagtctcacgccttattacatgaaaatagaggatatgatccaatggattcccacttctatgggatattggtcaccaagaaacataagaaatgttgagtcatatggtcttgagtctaaaattgggtttcaacacaagttttcaaaggaacattctttaaaaataaatacgggatacagctatacgagatctgtagatcttgagacgaaaaatcagctgatgtatgttcctcttcataaggttttcggtaatgcagattatcagtaccgatttatgaatctgtatgttcagggaatgtttacgggtaagacttttaccacttctgatgagaataacgattatcttataaaaccatatttcgtcctgaatgcaggattgtctgcaacggttgccaaaaagtatactttaggattgagggtaaataatattaccgatgagatctatgaaacgatggcatattatcttcttcctaagagaaactacagtttttacatcaacttaaatttttaaaatcaattattatattatgaaattcaacagactttttcagcttttactggctttgatccttgtgattaatgtttcatgtagtgatgatgaatatgtaatgccgtcgcgaggtgattatgaaaacggatattttattgcgaatgaaggtaacttcggaacacctacagcgagtgtttcttttatttctaaagatctttctgtattggaaaacgatatttataagaaaaataacaacgaaaatctgggtgatgttttgcagacgatcacattcagtgatgacagggcttttttgcttctgaacaattctaataaagtacaggttgttaaccgttataatttcaaaaaaacaggagaaattacagcacaattggataatccaagatatatgacaatcagcaacggaaatctttatgtttctaacgataagtataacggaggaaaatatgtgaatgtttacaagctttctgatctttcttttgtgaagaaaattcctttcgcttccacttctacagcggaaagagtggtagaagcaggaggaacggtatttgtgcagaatgctacttacagctatggaagtacgcttacgagaatcaatacttcaaccaatgagatcattaatacggttgctgttcctaacggtgagatcgaaaaaaccatcagttacaataacaatgtatatgtaattgcttcgggatcatctaattcttatatctacgaaatttctcctgcaggaacgattacaaaaactacaactttaaccggtatcgccaatgcaagaaaccttgaaattgatggtggaaaatattacttcacctctgccaacaagatttatacaatggatatgaattcgacaacggctccttctgcccctctaatcaataattttgtagacggaggacaatattttacgctgtatggcttctctgtaaaagacggaaaaatctttgcagccgatgtaaaaggttttaccgctccatcagaagttacagtatataacacttcaggaacagttctgaaaaaatttgtaacaggcatcggatctaatgccgcttatatgaattaatttttttgaaataatattaaaagattacggcggagctttcagctccgccgtaatcttttaaggtcttttgctataataagaactgaatatttattttttgaattaccgacttggttgaaatactcacccccttttccttaaagtaagaagctgaagaatgccagtaaaccaccagaccggaaacctgaaatacgtgtacaaaagcgtgaaattatcaacaattggctgatcttttgtcgctttttcaatttcaaaatcaacagataaaagcggaataacaaatccgaaaaataaaaacgcaaccagatataaaatccagttgcgttttctaattattttaaacttccagacaacaatgttaataaagaaaattaatactaaaataatataatcaaatgtcccgaaaagcatttaggcaagtgtcagtcccagtttttccgcttcagcaatcacgaaagttctcgcttcttcgctgtcgtttccaatttcgccttccagaatggcttccttcactttttcctttaaaattccgatctcgcgacccggttttaaattaaacattgccataatttcttctcctgaaattggtggctggaaattccttacctgatctttttcctcaacttctttaatcttaacagcaacatattcaaaatttttcttgaatttctcctgctttttagaatttttagtggtaatatcggctttacaaagggtaaaaagatcttccatattttctcctgcatcaaacagtaatcttcgcaatgcagaatccgaagcgtcatctgtaattaaggcaatcggtcgcgatgaaagttttaccattttctgaacatatttcatgtccgaacctaaaggcagtttcagtctctggaataatgtttttaccatttttgagcctaaaaactcgtgcccgtgaaacgtccatcctgttccttcaacgaattttttggtcggtgcttttccgatgtcgtgaagcaatgcagaccaacgaagccacagattatcggtgttttcagaaatattgtctaccacttccaaagtatggtaaaaattgtctttatgggtttgtccttccacttcttctactcctttcagatcaatcagttcaggaataattaatttcatcagacccgtctgttccattaatttaagaccaatagatggctttttggaaagcatgattttattaaattccaccatgattctttccatcgaaacaatttttattctttccgcttcctgcttaatggcttccaaagaattttcttcgatctgaaactgaagcgtagaagcaaaacggatggctctcatcatcctcaaaggatcatcagaataggtttgttcaggttccagaggcgttcttaaaattcctttttccagatcatctactccattgaagggatcgattagttcaccaaaattatcctgatttaacgaaattgccatggcattcaccgtaaaatctcttcttttctggtcgtcctcaatggttccgccttccacttccggtttacggctgttttcggtgtagctttcctttcttgcgcctacgaattcaagctcaagatctttgtacttgatcattgctgtcccatacgttttgaaaacagaaactttcattttcggatcgatttcttttcctacgttttgggcaagctcgataccgctttgttcggtcacaaaatcaatatccgttgatgcttttcttttcatcaaaagatcgcgtacgtagcctccgacgatatacacagactggttgtttcgggctgcaacctccgaaatgattttgaaaagttttaaatttttattttgagtaagattaattttcattttctaatccgctaatgccgttcattaatcgtaatgagcatacattttattaatttttccatcttcattaaaaaacatcacttccatcgcatgtttatccataatggatttgtaaaataaagccacagaatctactcctgccgtagattttataagctcgaagtgaagatcaggatatttttccagcgctgccttccaatatccgcgaacagcagattttccttttagtgaactttcttttcctcctgttgctaattttatcatcggcgtaacgatctctatatcatccgaataatgagataaaataatatccagatcatgcgaattccatgctttaatccattcttcagcaaacttttgatgatccatcgcaattgttttaaaattgaagttctgcaaagataaaactaaaaaaagaaatcctgccgatacgaatgaataagactttaaaatatatgataaaggtcgattattctctcagaacttttattctgttgtcgctccagacttttattaccgacgaacccgaatattttgaaactttttcgcggtcttcttctactgcatagtctacaagatcaatcatttcaggagaaatatccgagaatttcaaaggacttttttcaccgctgaaattggcggaagtagaaaccaaaggtttgttgagttttgtaatcagttttttgcagaagtcgttttttaccagacggattccgatgcttccgtcttcagccaacaattcttttggcaatcctctcgggttttcataaacaattgttacgggcttttcgctcagatcaataatttcccaagccatttccggaacatctaccaaatcctgtaatcttttttcagattccaccaagatgatcatggatttgtttttttcccgttttttgatgtcaaatattttgtttacggcttctacattggtagcgtcacagccaattccccaaatggtgtctgttgggtataagattgttccgccggattttaaaatttctattattttttccattgttttctgtcattgcgaggagcgaagcgacgaagcaatctcaaaaaggattgagaatatctttaatatcttctgttaaatctctccactccggattaattgaatttattaaatcaatttttttctgtctcgaacctgctttaatttgtttttctctaaaaatagcatctcctatttcctgaaataattcccaatagacaagtttgtcaatattatatttagatgtaaagcttagttcaaaaatcttttctttatgctgataaattctttttggtaaatttgatgttaccccagtgtaaagaaccgtattatttttattggtcataatataaacaaagcctggtttcatttgtgttcatctttaaaattatgagattgcttcgtcgctttgctcctcgcaatgacataaaattaaaaaactttacaacttcggcaaatatctttcctcaataatattcagatgatgaatattgtgaccaacaattaattttccgatggtttcggcagaaatctggtttccgttggcggatcctacattttttaaggcttcggaatttgcagtttccaacagaatctgagaagattttctgatcaattgatattcttccaaaagtgaacttagtgttctttcattcgcgaaagactgtttagcgtacaattcctcatcaaaacccggcaattcattttggtcgcctctcgcaaaagccagtattctgtactgaaagattctttcggtatcggataaatgcagaaggagttctttcagcgtccattttccttccgcgtaggcaaaaagagattgttcttcagaaagttttgagtaaattcctacagttttttctccggattttttcagttcttccagccagttttctgaaggaattaaatctaaatatctttgaacgtatttttgaaaatcagtcatatataatgaataataagtaattggtaatgagtaatattttagtaacaattaagatttcgtaaactgttacactggtaaattgttacattatgaaatcttccattcgtaaaaattcacttcatcgtagatttcgaatccgcagcttgggtaaagcttatttccgatatcattggattttccggtttcaagaagaattccggcagcatcggttgattttgcaagttctttggatgcttcaatcagttgttttgaaaacccttttccacgataattttcattcacatacaaatcattcaaaagccagtatcttttcattcttgtggaggaaaataacggatacaactgaacaaaaccgactaatttcccttcattttcggcaacaaaaatttcggaatcgttattttcaattctttctgttaaaaatttttccgcagcaggaatatcggaatctttatgataaaagatcctgtactgatcgaacagttcagataactgctgtacatctgcaagttgggcttttcttgtcatatagggagtttaaaactttgtcaaagcacaaaaaaacttcataaagctttaacaaagtagattataaatgatggtcgtagctgagaacgcgcttcattttccagtcttttccgtccagaatccagagaatggtaaattttgcacggcttcccttgttccattttccgttgtaaaattcagcaaaatcatgttctccttcctgaatgaaagcatacacaacattattgttgtacaaaggatatactttcatggaatttggaatcagttcgcgtttcactttgttgggtccgccacaaatattgtttttaatggaggctttgaaggcttcttttccggaagtaattccgcctttatcgtggtagaattccaagtcgttgcttacgatagagtcataatgagaaagatcgcatttattgaatccgacatcgaatatcagactgtctaattttttcgccgttttgtacagttcgtcggcatttttaacctgagaaaaggcaatctggcttaccattaaaaggaataaaatctggatctttctcattatgtttttattttaaaatgttgttcaacactctgtcattctgacgttaggaagaatcttttttaatacatttttgaatttctattccaacgtttgtcattccgcaggaatctcggctctaattttttcaagcaactttctaatactatctaaagatcctttcaggatgacaaactttaatcgtatttttcaaatactgaaagaattgactacaatcctagccacgattgcaacggcatccttttgtgaagcaaagcgtagcaaaagatatagtggaaagcgggaaatagctccaaaaatttaaataaattctatttagattctttactccaattcgttctacacagaatggcaaagtgttataaattgttttttaactaagaaaaagctctttccagatctgcgataagatcttctgcatcttcgattcctacgcttaaacgaaccaaatcgtctgtaattcccaattctgcacgtttttctgccggaatggaagcatgagtcatcaaagcaggatgattggcaagagattctactccacccaaagattcagctaaagtgaatacttttactctttctaaaaatttgatggcatcttcttttttacctgatttgaaagtgaaggaaaccattcccccgaaatctttcatctgagattttgccagttcgtgttgcggatgagattctaatcccggataaattacctgatctacagcaggatgagattcaagatattttgctatcgccattccgttttcagaatgtctctgaactcttaaagccagtgttttaattcctctcaacaccaaataagaatcgtgaggtcccaaaattcctccgcttgcaaactgaatgaagtgaagtttttctccaagttccgcatctttagccactaaagctcccgcaataacatcggagtgacctcctaagtattttgttgcagagtgcatgacgatatcggctcccaaatcaatcggtctctgaaggtaaggtgtagcaaaagtgttatctactgcaaccagaatatcttttccttttgccacttctacaaccgctttaatgtctaccagtttcattaaaggattggttggcgtttcaatccagattagttttgttttatctgtaataacgtcattgattttagaaacatcatcaaaattcacgaaggtaaatttcagctgatatttttcgaaaagtctggtgaacattctgtacgttcctccatacaaatcgtctactgcaaccacttcatctcccggatttaataattttaaaacacagtcgattgcagccaaaccggaaccgaaagccagacctctcgctccgttttcgatgcttgccaaagagtcttccaaagcctgtcttgtagggtttgccgctctggaatactcgtagccggaatgtactcccggacttttttgtgcgaaggtagacgttaaaaatacaggtacattcacagaacctgttgcagattcgtgatgctgtcctccgtgtattacttttgtattgaaattcattgttttataattttgatttgaagcgggatgatggaagccggatgcttttgtaaacttccaacatcaggcttccatcatcccgcttttttttacatttttatcgccgattttactgcgaactcttctgccatctgctccaaccattgtgccacatcttcttcacctgttgctctttggtaggtatttcccatagaaacaagcacctgatgaatgaacattttcatctgatccaccggcatttcttttgtccagagatcaattctcaaagcttccatatttttttcgtcccaaacggagatcatggttgcttttgtttcttctttttcaatgccgccgtcctgtgcgttccaggtgatgttttccggaatgtggttttcatccagttctacatctatcgtaatctgagtttttctcataacgttctgtttattctactatatattgcttgccaaatattttacattcagcgtattattttactttcggtttatagcccgactgattaaagatcacggttgcatccaatcctaaaaaatcctgaagtttggtttccggtttctgtttcagatattctttacagatctgccatcctgtgaaaatggcaatctgcggagaagattcgttatcaatttccgtataaaatttcgaaaatggtcccggagcaataaaacggtcttccagtctgtgatcgtctccaaagatgatattattttccacgaaataattccagatgttagcttcgttggaaactgcccattcatactgcttctgagtgtagttcattttcaggtattccggatatgttggtaaaaaagcgtctttaagaatcatgattttaccgttgagaatcatcatatcgataaatttctgatgatccggagattctttcacaaaaccttccgcgaaaatctgcgccactttcggaacaatattattcgggttcatggatttctggaagtacatttccagccctttgtaattggcgtttccgtctcccataaagcctgtaatatcaataaaaagctgatttcctttggcatcataaaaaataggatcctgaaccatctgcaaagccgatgaaaataaaaatactttcggacttttaaaggaaggaaaataaaacttgatgtgcgaaaacaaatcctgaagatcggtctgcagttttttctgatctatttttgcggctgcttccttgtaaattttaatttcttcaggatctgctcttcttttggcaaaatctgcatcgcttaccgttccctgaaaccaaggaaatttagctttaaaactttccgatgaaacattcggatcgtaaagttctttggaaatatctgtaatttctactttttccgcgggagttgtaatctctacgttccattgattctgagattcttttttacaggaattcaatcctaaaattaatactaaagaaagtgcagtaattctgaaaatcttcatacttttacatgaaatttaagtgtacaaaaatacggatttaaacataatgtactgatgaaaaataaaataattgcgatcctcgttctgattttctctgtatcctgtttctatagccaaagccttatttttaaagataaaaatcttgaaaaagcagtgattgaaaattctgatctgaacaaagacggcaaaataaatcagtttgaagccgaaaggattgaaaatttatttttagtgaataaagggattacaaatatcgaagacctcgcgtattttaaaaatgctaaaatgatcgtgctggacgacaacagtattttaaatctttccctgaaaaatatggatcatctccagcttttttcctgtacaggatgtaaaatatcaaatttcaaagctgaaaatcttaaaaatctggcttctctctatctcgacaacaaccagattgaaaatatttcgctgaaaacgacgccaagaattgaccaattaaccgtatctttaaataaaataaaaaccattgatgtgagttcgctcaaatatctgaaaaaactaaatcttgagcataatctggttcaaaaactggatatttctcaaaatatgaatctggaaactttaaatgtgatgaaaaatccgctaaaggaaacagacattaaaaaaggagcagccaatgtaacgattttcggatttcagcaacagtaattttatgtatttagaaacacaaagacttattctgagaaaatttgaagaaacagatgcagaacgtttgtttctcctcgactccgatcctgaagtgatgaaatacatcggagtacctcctctttccgacatcagcgaatctgaaaatgtgattaaaatgattcagcagcaatatcttgataacggtgtcggaagacttgctgtaattgaaaaagaaagtggactgttgatcggctggagcggactaaaattaattactcaggaaattaacggctacaataatatttacgatctcggctaccgtttcatcccggaatattggggaaaaggttatgcgctggaatcggcaaaagcttcacttgattttggatttaacgatctgaaagctgaaaccatttacgctcacgctcattctgaaaacgaaggttccaatcatattttaagaaaattaggcttcgaaaaaaccggcgaattcaccgaaccggacggaatctgcttctggtatgagcttcaacatcaaaattacatcaaataaacattcagaatttttaattttgaatttctttacacaaaaacagacaaaaatataaacaatgcagacacaaaaagttatagaccatattgtaaactggctgaaagattatgcagtaaaagcaaaagtaaacggatatgtaatcggagtttcgggaggtgtggattcgggtgtcgtttctactctttgtgcgatgacagggcttgaagttctggctctggaaatgccgatccgtcaaaaagccgatcaggtaaacagagcgcaggatcatattgaggatctgaaaaagaaatttccaaacgtaaaatcagaaaccgttaacttaactcctgttttcgaaagttttgaaaatattgtcagcgcacattcagaaggaaatcccaataacaatctggctcttgcgaatacaagatcacgtttcagaatgcttaatttatattatttcggtcagcttcacggacttttagtgtgtggaacaggaaataaagtggaagatttcggaattggtttctacaccaaatacggcgacggcggtgtggatgtttctccaatcgcggatctttacaaaacggaagtttacgaactggcgagagctttaaatttaattgaaagcattcagaatgcaattcctacggacggactttgggatgcagaaagaacggacgaagaccaaatcggggcaacctatcctgaactggaaaaaatccagaaagaatacggaacaaaaacagcagaagattacgaaggaagagataaagaggttttccagattttcgacagaatgcataaagcagcaaaacataaaatggttccgatcccgatctgcgatattccggaagactggagagcataaattaatgtaacaatttaaaagtttaacaatgtaacaatggattgctaaacttttaaattgatacattaaagttgtttaaactatttcagaattaaccgtaaaagtcacaaaagatgaattaaacttttatttaaagttgatcattataaatgaaaaaggtcacaatagtttttaaaatctttgatttttattcttttgagtgctttgattattatagaaattcgctttaagattgtcttttgtacttttgcagtttaataaaagtttaaacaaacttattattacattttttaatttaatactatgaatggtaaaataagatctatatttttcatttgtttagggcttctcttcgggatgtctgtaatgtacgtttataataactttattgcggataaaaaggaaatttcctctaaaaatccaagaattgaatacggcagttctgagatttcgggttcagaatattcgaatcaggaatctattgatcagttgacagaagaaaaaaaggttattgcttacattaaaaaaaatcatcagcttccggaatattacataactaaaaatgaagcaagaaagatgggctggaatccttctaaaggaaatctgtgtgaggttttgccgggaaaagcaattggcggagatcacttcagcaatagggaaagaacattgcctgaagatgaaaagtattttgaagctgatgtaaactatcattgcggaaacagaaatgcagaccggattgttttcacgaaagacggtgatgtttatctgactaaaaaccattataagagttttgataagcagtaatttttatcatctgttgttctgtttgctcgtagtattttcatgttcagaaaaaaagcagaaaattataaaaaaagacaaggaaacaacaattttgatacagccatttaaagatattgaaacagaaaaagtaaactttatagccaaagaaatagcaaagatttgcccgaatgtgagaattctgaagccgattgattttcctgagaatacttattataaaccaagaaaccgccatagagctgattctgtcatttcatatttaaataaaaaaacgaaagatggctttattaccattggattaacttcaaaagatataagtgtaacgaaaggaaaaataaaagatttcggagtgatgggtttaggattccgacccggaaaagcctgcgttgcatccgacttcagattaaacaaacaaaattctaatgaacagttttttaaaattgccattcatgagcttggtcacacacaaggcttaaaacactgcccaacaaaaatatgttttatgagagacgcagaaggcaagaatcctacaaacgaagaaaatgacttttgcaaaaaatgtaaaaatgttctaataagtaaaaactggaaatttaattgatatgagtacaatatatatagattttatagacatcggagattatgaagatttctatgcccaactgaaagaaaagatcaaacttcctgagcatttcggagataatctggatgcactttctgatgtgattacaggagaactggaaatgccccttcacattgagtttgtaaatatgacggtcgatcagctggaaatttttgaagatcttcttctcacgcttgaagatgcggaagaagaaatggaagattttactttcacttattttctcgaacagtatgaagacgatctgaacgaagaggaagaataaaacaatatacagcccgcagattaatctgcgggttttttatgcattaaagtttaatcttaaaaaagtaccaatagtaatgattcatttcttaaaatcaaggcatatttaaggcatctatgtggtattaataaattttcaatacactttacaaattgttaactttagatcaaattaatactaaaaaacttatgatcatttgtgaaaaccttttgttttctcatggcgctgaactgcaacactataattccggcgattatgtttttaaggaagaaagcactccgaaatattatctgcagataaaaaccggaacagtaaaaataagcagctttctggaagacggcaaagaattcattcatggaattcctttcgatggtcattgcgtcgccgaaacgtatattttccacaataaaaagtatgctgtaagcggagttgcaattacagattgtgaaatcatcagacttgaaaaaaataaattcttacaacttttattagaaaaacctgaacttcttctcactatgtattcttacaccgcagaccgtatgcgttacagacacatcactgctgcaccgttttctttccgggatccgattacaaagcttactcttattatgtctcatgtaaaagctcattttggttttgaagaacaattctcctttgtgattccttatacaagacagcaattagcatcgctcacaggaatgcggatagaaaccgtaatccgcgctataaaaaaaatggaacagcagaatatggtaaagatcgacaacagtaaaatttatgtttaaaaacaaaaaaaatccttaactttttggttaaggattttatcatttatctttaaaggaaagtactattttccaatcacttccgtaatcggatttcctacatttccgcttggaaactgaattttaagcaatgaagaaacggtaggtgcaatatcggtcatgaagtacgctttattactttcaccatgttgaattccccatcccataaaaattaacggaatatgcgagtcgtaagaattccatacactgtgcgttgtccctgtttttgaatacggaggaagcatggaatcatgtgaaatcaactgaatatcaccacttctctgtctgttgattccgttgataattctttgcttaatcggttccggaatagaagcttccgaaactttatttaccggaacagcatacaaatctgaaggatcgctttcaatttcttttaccgtgaaatctacaacgtcttctaacttgatattattttctttcagtaattttctgtcgaaataaatctggtaattatctactgcattgatcagtttatctaccccgaatttttcttttaatttaagattgacgtttttatccattccgtctccgaagaaacctgtcgtgatcttatgttcctgtaagaaacctacagaatgcgcaccgccgtgatctgctgaaaggaaaaccgtatattgcccctttcctactttggaatccagataattgaaaaactgggctaaatctttatcaagtcgtaaataaacatcttccacttcaatagaattcggtccgaatttatgtcctgcataatccgttgatgccaaattaatcgctaacatatccaccacatcgtctcctcctaatttttcgccttcaattgcggcttccgctaatttcagcgttaatgtatttccgaatggcgtgtaacggatattatcttttttagcctgataatcagcagctaaattgctgtaaggaaaagtaggcgttttggcacttcccaacaatccttcccatgaagaattatccggagaactttctgtgtactgctcgatgggaagcaaggtattccagccattagcaaccaatttatccggtaaatcctgagaattgaaggtttttacccactgtggaagatcattcatataccatgaacttgtgataaagtctcctgtggaatcatcaaaccagaacgctccgttcggcgtatgtcctgccggtaaaatagacgctctgtcttttaaagaaaccccaattacttttccctgaaagttggtcgcaagtctcaattcatcggtaaccgttgtcgaccatagatttttcggagaatgacttcctacttttgcattggttgttcctacaggttttacgctttcatctgtggtacagtagacattttgcccggtttccttatccgtccagtcgtttcctgcgattccgtgaattgccggaacagaacctgtgtagatacaagtgtgtcctaaagctgtaacagtaggaacgtaaggaatatgaacgttatttaaagaatatcctgtatttaaaagtcttttgaagccgtcgttaccgtatttgttataaaaacggtataaataatcccacctcatctgatccacaaccaaacctactaccagttttggtctttccaactgagaatttttgttcttctgcgcattgattgtaatgacggacaaaaaagcagccgccgcaaccgaaattttcctaagcatccagtaaaatttttattgaccacaaatttaagggttttgaaagttttgatgtgtgaaattataattaattttaaagttctaatttgacttaataactatgaaatattttgtgttgtttttaatagcctttccgttcataaaattgtctgctcaaaaatatattccatttgattgtgatgattttaatttcaacattgaatccagtgcaaatacttctataagattcatcaatcagtcggattacttttcatcattaaaagatacggttctattacccaaacaaccgttaataaaagaaaatgagaaactttatacagaatttcagaaaaaatttcctaataagatttccactcattgcattaaagctaaaactttttccagaggagaaatttcagaaacctcttattgtagtcaaagacaaaagatttttctcattacaaaagaaaaaaatttttacattttcaaactgaatgcatttgaagttgatgattttctattatttaatgaagataatgaaacaatatatttcacagaaaattatccgttaattctggatgaaggtaaaattatttttgatgtaggacactcttatcctggaaaacaaatcattaattattatcaattcgaagataaaaaagttaaatatgcatcaatcgatgtacctttcgactatagaattaccaggtacaatattgttaaatactctaactacaaagtaattacagaacttacaagacatcaattaaaagaaacttctcctaattattttgaaaaagacaaagatgtattttgtaaaaaattcatgatcatcaattgattctgatgcaatgatcaaatttcagaatttacaacaatattattttcaagtaacttctttaaaaaacattttcattattttattgaaattaaatcaattttaattagctttgaaattaacgtaaaaacacaacttattgcatctcaaaaacatttctaatcatgaaaattattagaccttttcttttttcagtatctctgttgttattcggttggctgttcatcagcaatatcaacctcattaatgttgcagcaacgctgaatgcagccgaaatcaattctgaagtgggaaaggtaaatgctttcagtaatattgatcagcttaaggaatttaccattgaaaagatcaattatctggaagtgattcgggaaagattttcggaaaatgccatgatacgaattgttgtgatttccgttcttgttatgattcagattttgctgtacgcgacaaaaagcagatttcatgctcagaattctaaattttaattcatggaaatcagaaaactaaaaatatttgaagaaaatttcattcctgatcctgattataaaagctacgaaactgaaaagatttttgtggtctcaaccatcgaaaccgcaaattcttttgaatttaatctgagagaaaaaaaacagcattataaaaagattgggaatccggaaattgatgacattacctgttttaacgatcttattcagcaaggtcattcgttcggcatttttgatgatgaaaagttgtgcggatggatcatctgcgactaccggaagaaaaacaacagtctttttattgaagatatctggatcaataaggagttgagaagacagaatctcgggaggttactgatcaaaaatatcaaccgtgaagcccggaatctgcaatgcagaattgtggaagcggaaattagcaataccaattatcctgcaataaaattttttctgaaagccggatttcaatttacaggaattaatacaaaattatacaacaactccactgaaacggctttgtttatgagttttgatttgatttaatcaatctttattttctattgaaatttaacttatccacaattttttaaaagttatccacaaacaactaacaattctagaaccgctaatgattacaaaagcttacattcaggagtacggcaatggtaaaacagaacctgaatttctagaggtaagaactgttttggaatctataggagttgactgcgaattttttaccatcaaaaaattacatcgaaatcacatccagcttagtgaagaaacactgattgtcggagatcactcagcaatggtatatattttcaaaagattggggatcactccattcacctcatcttaccctaaaagtttaaggcattatttaaagcgaagtgtttgggaaacaactgtcaaaaaactcatgatgcaaagtcatgaagactctttaaacacttttgtaaaaccgaaatttaaaaccaagcttttcacaggatttgtcatcaattcacaacatgatcttctccgccttgaatcattttcaaaagagacagcgttattctgttcatctgttgttgaatggctttctgagtttcgggttttcgtgaatcagtcagaaattgtcggaataaaaaattacagtgccaacgaaaatcttcagttggatatggatatggtaaaaactgctattaaagatttcgaaaattcagatgaaagaacgaaggcatacggaattgatttcggaattctgaaaaacggagaaactgcattagttgagtggaatgacggctttgcattgggttcttatggtctggaaaaggatatttatacagatcttttaataaacagatggaaagaactctttagcatttcaaaccttaatttatagagttattttttatttatcctttattattaagctcaaccgcttttaagttcggaatggtgtttaaatttatctaatctttaatttcactcagctcaaattccatttttttgacagtaaaaatttcggacagtgactttctgataaaaaacaaacatcaatattttcttatttttcactgaattctttagtaaaaaaagcacttttaacaggtttaaaattaaaaaattatagatttcatatttaattacataaataattacatttaaattatttatatcttttatattatatgattaataaaaaagtcgtaaaaaagcacatttttgacattttcacaaattcaaaaaatagtgatataacataattaaatacacttttttgtgaattaaacaaacatttacaacaaaataactaataaaatattaataatttatcatattatttatatatttacaattgtaaaaaaatatgataatgaaaaacaaatttatttcagtaataagtctgggtattgtatttatttgtaatgcacaagttggaattaacacaagcaatcctgcaagtacactggacattaaaggatcttttgcaacaccttacaaagccgtaacggcaaccacctattcattattaaattcagatcactatttagattacagaggaacctctgctgctgtgtggactcttccggcagctttggcatctccggcaactttcggaggaaggatctatgaaatccgtaacggaagtaattttgacgttacaattaatcttagtggttcggaaaaaatagatgtttctaccacagcggtcaatcagtctggttttacgattcccgcaggatattatgcaactgttaaaaatacagggcttacctccggaacaacctgggttgtaacacttcttaccacaggcaatagcagttctgcaaattctacaggtttcagtacatcaattttagggtacattcctgttaaaacttctcagagagcagtaccggcaacctttggaggagtttccgttacagaaagaggatgtaaaaaatggtccggaacaggagcaaatggtcatacatattgcgcttatcagttgggaggtgcaaaaaacttctacgacacatttacttttgcaaaacaagtgggaggatatatttctacaattacttccaatgcggaaagaacatttatttacaacaatcttttatcaaatacaacaggctactcgcttaataacagcatctggataggctataacaaggtggcgtatcccggtaacagcaatcagttcacatggatcaccggagaagactggacgatcgactggacgacctctccaaattcaaccccgcaaaacttctttgcaaccggggaacccaacaacagcggaggaacggaaggctcatgccatattttcccaacttccgtcaacagttcaagacaatggaatgatcttacaggaagtcttacggtaagcggaggtgtgagttttgatcaggttattttagaatttaatgaagactaaacaataaaacataaattaaacatgaaaaataaaattataactataagctttgtattgtccattttttcgatagtgaatagtcaggtaggtattaataccaatactcccggaagtaccttagatgttaaaggctcttttgctactccttataaacagagtacagccacatcatatagttttttatctactgatgaatatctggattatagaggaaccgccgctgcaacatggtctcttcctgcagccgtagcatcacctgctacatttggcggcagagtttatgaaataagaaacggaagtgcttttgatgttacgattacccccaatggtactgagaaaatagatgtttccaatgtagcaacagctcaggcaagtctcacaattcctgcaggttactatgctgtaattaaaaatacaggggcaacttcgggcacaacctgggtagtatctttacttacctcaggaaactcatcatcatctggttcagcaggattcagtacatctattttgggatacgttcctgtgaaaacttcacaaagagctgttcctgcaacattcggaggggtaagtgtttcagagagaggatgtaaaaaatggtcaggaacaggttccaacggacatacttactgtgcttatcagcttggagggggcaaaaacttttatgatacttttacttttgcgaagcaggtaggaggatatgtggttaccattacttccaatgcagaaagaacatatattaataccaatattttagcaaacacaacaggttacaatcttaataacaatatctggatcggatataacaaagtggcttatcctggaaactccacagaatttacatggatcacaggtgaagactggacgattgactggacgacttctccaaactcaacccctcaaagtttctttgcaagcggtgaacctaataatagtggaggaacagagggatcctgccatatttacagtacatcaggtaatgcctcaagacaatggaacgacttaataggaacctctaccacatttaatttgagtgcttttgatcaggttattttagaatttaatgaagattaaaaaactgaaaaattatgaatttaaatctttattaaaatcaacaaaaataaaaggctgtctcaaaacaaagaacagccttttttgtatctaaatgtgagtttacttaaaacttcaaatctccattcacttctcttactgcatttgcagcttcagcaaatttcaattgctcttccgcagtaagcgttacatttacgattttttccacaccgtttgctccgataattgcaggaacaccaaggcagatatcattttgtccgtattcaccttcaagcattaaagaacaagggatcatttttttctggtcgcaagcaatagcctgaaccattacagaaactgctgctcccggagcgtaccaagctgaagttcctaataatttggtaagcgttgcacctcctactttggtttcttcaataacgtatttctgttgttcagcatctaagaattctgttacaggtactccgtttcttgttgccttgcttaatagaggaagcattccggtatcactgtgagcagcgattaccattccgtctacgtcagagatcggagcttctaacgcttcagccaatctgtatttgaatcttgcagaatctaatgctccacccattccgatgattttgtgcttcggaagacctgaagttttgtgtaccagataagccattgtatccattgggttagaaaccacgataatgattacttccggagaatgttttactaagttttctgtaacttcttttacgattcctgcgttgattccgattaattcttctctcgtcattcccggttttcttggaatccctgaagtaataaccgctacatgagaacctgcagttttgctgtaatctcctgttgttccggtaatttttgtatcgaatccgttaagcgatgctgtctgcatcaaatccattgctttaccttctgcaaaaccttctttaatgtctactaaaactacttctgaacagaagtttttcattgcgatgtattctgcacagcttgctcctacagcgcctgcacctactacagttactttcataatatacttaatttattgttttttaatggtattacggaactttacagtttcataatataacttttaaaatttatttatctgaattgtttgtttacttttggtttacaattgaaaactcccaaatttaacaattcctgaaaaattgggcaatctttcaggaatttaattatctttaaaagtgatatttatattttaaatcgctattaatgaacgttcagaagaaatgcatacagttttttagctccggataaaacttcatcgtaatttttttcagaaacttcgccatccagaacttctttgaaattcttccacatagatcctgtattttcgcggtaacagccgaagaaattgaaagtaacatcatcaaatccttctgttttggaaagctgttttgcaataacatttcctcccagggtagaaccttcgatcacatacattgctcccaaagcttcattttcactggaaaaactaagttcttcagtagccttttgatgatcgagatccagacttttaagatcctgctcaatcaaaggaagtttttttctttcctcaagctgaagtttttcagagaatttttcagaaagactttcgaagatctgatcttcggaatgaagaagcatcagataatttctgccaatgatctttttgtaatcttccagtgtaaaagttctgtcgaatatttttttagagttaaaaagtttttctgcggcatcgtgaaattctgccgtattttgttttagatattcagataccataccggaattttaaagtaaatttttaattaaggttttttaaaggtgaggataaaagtagttccgtttttactgctttcgtaatctacgcttccgccaagtctctgcataattctgtgtacgatggatagtcctactccatttcctttaaacttcttcgcattatccatcctgttgaaaattttaaacattttatgcttattttcttctggaattccgattccgttgtctgtaattctgtagactaccgtgtcttcttcttccgttccgccgataattactttcggtttttcctgatgggaagaatattttatggcgttattgatgatgtttaaaaatacctgatgaagcattgttttatcggcaagaacatcgggacaatcattaatgaccacttcgctttctgaagtatcaaacgttatttttgcattttcggagatcttcgcgatggtttgcgccgtctgtaacctttcgagttctatttcgctgtgttttgcacggctcaactggagtacatcatgcatcatttccgccatattgtcgatttcctcgatgatggaattgattttatttctgcttttgtctgaaccgtctgtaagacttttcagaagcatctgtgcattcagtttcattaccgtaagcggcgttcccagatcgtgggaaatcgtataagagaaactgtccagttcttcgtttacttttttaagctcatcattaagccttttaatggtaatgtaatttttatgggacgtttcaaggatcagatcacgaactgcctgtaatgcggcaacgtttctggaattccatcttttagaatttcctttgatgtcctcggtaaagatctggaaagacgttcttggagaaaccacctgtgtctgttctccgtttttcacaatcacatctattttcttttcaggatttcctgcccagtcgatgtgttcatcaaattctttacggaaccagatcagcagattatttttagatttttcaataaaataaaaagccactcctgcacatttttcgtcaagaccaatctcttctccgtggtctttcagaaaacttctgctgagatagatattttcgtctatatttttgtgcgcccactgtatgagattttcaataatactctcatctggcgtttctccttccgtaacgattttttcatctgctacaattgccagtccgtctgcttcgggaagatcttttatttcagatttattctcaattaaagaatcaaaaagattgttgtattttaagaattcttcttttaagcgggaacatttttcattaagatacaaacggtattccagttctttttttgatctgaatgacgagtaggcattggacgccaaagccgtaaaaattcctgcctgaacacggtcttcaagatcaatgtgtttcggttcggaattctggcaggtaaccagcccccaaagataatcatcaataataatagatatactgaaactggaagacgctcctgaatttttaatgtactgcgcatgaataggcgacattccgcgagatcccgaataagtaagatctattatttcatcagatttactgtatataggaatggtctccgaatgaacgttgctgaaaattctttttctttttttaagataaagttctcttgcttgtctcggaatgtcggattccggataatgaagaccgagatagctctctatattttcatctcttttctcagcgattacttttccggagccgtccatcatgaatttgtaaaccatcattcggtcgtaattcacgatttttgagagggtatttaaaagctgatcccaaatttcctgctcatcttcaataatgtagaaattatcgtatttgttggaaattcttttgttgggattaatgatcactttttcaaattcaaggaaaattttccctttgcttctgaaaacggagaaatggtactctataccatcaataaagatcttgtcaaaatatgtttcgttttctcttctggtaaagtcggctaaagagttgtatatctcagattctataatgcttttaaagctttccggaaagtccgtaagcttcttatcaaaaagcatatttgcattttcgatattaaatatatcctcgatattcttactaaaaaaagctatggaatgagacttcgcatcaatgccaatcagataaccaaaactttgtatgtagcccggaatatggataggctcctcatgacactcaacaaaattcatataatattttgacctatcaaatatacgattttttttatccattcggattttttctctataaacgcataccacaaaaagttataaaatttcagcagaatatgggttttaaagaatatttttctctgttcatcggatatacagaaaatttaaaaccaacactatcataattatcgttaactaaatttaaccataaatcgttataaattctcccaattagtataaatccggaaaattcacctaaaaacacatcaaaacacttttatttttacagaaaaaacatatcctagattataaatatttaaaatcagggatatgtttaaattattggagcttttctactcctgcgaaatttcagttcgttgaaaataaattcctgtagttatatttctttttcgaaataaagcatataatattttccgttttcatcttctccctgagcgagtttctgtctgtcgccgtgaatgtagatatggaagtttttgtctaatttaatgatgcttttaaaatgtctctgcgttttctttaccgcggcttcactaatgggaaattcttccgcaatgttaatctgcatatcctgttcgtaatcggttttaaagttgttgaaactttcgattacgtgttcgtcgcccaaaacttcggcagcaaattcatccagcttaaactcttccttttctttgaaaaaattaatcgatttatttaaaaaatctgcctgatctgctttggaaacttcaaattcctgaggcaattgcttcgtgatgtaatctttatacaccattaaagcttcctgcgtatgaaaatattcgtcgtcgcgctgttttacctttaaaaaatcttcgaaccagtaatacatatctccatttttgttgttgtctacaactgaaagaacgtatcctgtttctttgtcgttattatagattaacgccgctttatctattttagataaaccgattccctgatctttttcgatgtcaaaagtttcgtcattgggagcaattttaaggaaagattctcttttttcggtcttaaaaattccgatcttgtctactctttcggttccttctctttcgtcttcaaaatatacgatgaataattctccgccctgaactctcgggttttcagcagcttcaaaaagatgtttggcgatgttttcagattcccaaaggaatttcgacttgtcatcaaaaatctcggaaaccgaactgtacacgggattatttacgagataagaatcactgtaaaaatggaaggtttcttctgatttaaaggaacctaagaagtaattttccaacagttccgccattccttcttccaactgtaattcttcctgagaaagcgttaaagattctccgttgattttatttccgactctgtgtactacgatttttgaaaacatttcctgaatattttttggactgcaaagatattaattaaatcagacaatcgcgaggatttccataatgataaatatgctatcattatgataagattttgaaggatttttaaaattaaaacaaataaacaaaacattaataatcaacactttaatttaaattaaaattcaaaggcatttctttggcagcatcattctcaaaacataagaatatggacttaaaaactttgaacagaattgataagctgagaagattaaaaagcagaggaccgcaaaccccgaagtggctgaaaccgtatcatcttctgattgtagcctttttggcagtttttactttcggagcattcattaaaattttagaacttaatcaacaataatatgaactatttagaagctgcacaggaaatcaaagaagtgattcccgagattgaaaatgagctgaaacaaaacagaaaacaaaattcctacagcgttattcagacgtttacagacaatattaaagatagaattaagcaaaatgaccggaatattctgtttctatgtctgaaaaagatggatgatatttacagaaacggagatgccgtacttaaaaacgctgtggaacatacgtttatttattcactggacaattctaccgttttatgcagtgaggagtaccgaaaaatgatctttagtcatatttccaaggatcttcagacggtctattccagacaaatctacaaccacggcatttaagttcattacattttttgcagattttattacaaaagcacgaaaattcagaacatacaacctcattaaaaatcaactgtttatgaaatctaaaataagaagaatttccgactggaaaacgctccaaaccaccaccaacagacataatattgaaattctggcaacgcacatcgctgtgatcgtaggagtttttgtttttgcagcaattctgtaaactttggtacagttttcgccgcaatagaaagtgttacgaaaaatattaattatgatgaatgtacagatgcaaactattaatcaaaaaatagctagtgagtatttaaaatttttctatccaccccttcgcacagaaattacccaattgtcttcacaggataattttgctgggattatgcaggcaaccattaattatcttaaaaagcttcttcacgaatctaaagtgaatattattgcccatcacatcaaactgatggaaatgatctataaaggaggagattcttatgtgaaagatatgatcgagaatctttttgtgcggtcttttgaaagctttaaaaagcacgccaaaatctcccactggaaacttctttaccaatatatgcctgtgacttttcaggtgatctacaacgatcagcgaaagcaggacaagatcttttttgggaagtaaattaatttttaaacacagtttcggcgaagcctttggcttcgccgaaactttttaattcttctttaaaaaagtctgttttaccatctgaagttctttgtcgttcatctttgaagatttcttcagtttggcaacaaaaacatctacttcttcagcagttgacggacagcccagattttcgtttttatcgttgaaagaatctgcaagcacctcccctttaggattcaggacgagccagaacggaagtccggcatctttgcctttgtatttttccatcaatacttccccacccggattttcaagctttttcttttcgcccatttcctgaacatctatataggcagtaacaaattttttatcaaaaatcggccttgtttccggtaaattcatgttcttttccataacgtgacaccatttgcaccacgaagcgtgaaacatcagcaaaacatttttatttttggatttagcttcggtaagcgctttgtttaaaacaacatccgctttttcctgagcaaaatgtaactgaaataataataagcctaaaaataagagaattttagaaattttcattttggatctgattttaaatactaatctaaagatttttttgttgttatactaacactttttaaaaactatttcatgaaactcagactgatttgcatatttcttactatttcatttatatcgaatgctcagatttccagaaaactaaaagataaagttgaaattattgacaaaaaattttttgatataatacttcaaacttatgataataaaagttacgaagaactttacactttatattctgaaatatctaaaacagccacaaatgatgagcttttttatcttgctctaaatggaaatacatttattcgtcataatgcagcttttagtttgctctataaaaaggataaaagaatcatagatttgtacaaatactattctaaatttcctatgcaatatgaaataaaaatgagctgcatcattgcccaacaagatatggcactaagtataagaggatatatccttgctgagttaagaaactacgaggagtataaaataatatcgaaaaaaagtaatcaatccaaagatttttacacaaaagaagaaattaattattatgaaaaattagatattaatttttttaaagattgtattgatgagttcgaaataatcgatgaaacttatattccggagagattggaaatttataaaatcattaatgagaattggaaagatggtaaacttcaatttccaaataattattaaaaacaaaaaatattctttaacaaataacttagttttaaatttctattattttaccatgaagctaagaatattgccacttttactttttacaattaccttttgtgaagcgcagatttctaaaaaagtaaaaatgttagccgaacctttagatacaatacagtatgcagaatcttcacatatcggaataggtggtgaaagaagtaaactgtatgatgatttcagaaaattagcaaaaaatgctaccaatgatgagcttttttatctggcaaaaaacggaagcaattctttacgattatattccggaaaagaactttttaaaagaaacgataagagatttcttgagatctatcaatattatcatgacaatcctttattcatgaaatatatagatggctgtatgggaaaagaagataatattacgaaccatttgatggatgaaatgtatgcagcaaaggaaattatttccattcgagattctatttcaaaagagaaaacagataattttactaaagctcaactgaaaactactaatgatgaaggctatgaaaaactgaaaaagaaagaaatacaattttttctggatcatttggtaaaaaagaaataataaacatgaaagaaaaactactttgtctactctattttttgataattgtgaatatttccgcacaaattccttctccaaaggtcattaaaaaagaattcatttttgaagaaggggcatatttcaaacagtgtcatgcatctacaatggaacagtcttcggacggacatcttttggcaagctggtttggaggtagtcatgaaggtgctaaagatgttgtgatctggggagcccgttccgatggaaaaacatggagctctcctgaaatctgggcagatggaaaggttaacgattctctgcgttatccctgctggaatcctgtcttattcagatcgaaaaaagaaaagattatctatctctattataaagtaggacccaatccgcgggaatggtggggaatggttaaaacctcacgagataacggaaaaacctgggaaaaagcacagcggttaccagattctattcttggtcctatcaaaaacagacccattgagctcgccaatggcgatattatttccccatcaagcagagaaatcaatgaaaatagatggaaggctcatgtggaaatcagcagggatcaccagaaaacatggacatcgtattccatagattctgcttcagcatttaatgtgatccaaccgagtattcttttacataaaaatggtaaactgcaggttttatgcagaagtaaagagggagtcattgcaacctcatggtcacaaaataatgggatgaactggagtcctttaaccgcaacaaatcttcagaatcctaactcgggaacggatgccattgcttttaaagatttttttctgattgtatacaatcctgagcttcccggaaaagactggtgggaaggccgcacaaagttacgactggcttattcttacgacgggatcaactggaaagatctcctttcgttagaggatgaaaaaaagggagaattcagttatcctacaatttttaaagatgcaaaaggattggttcacattacttatacctacaatagagtaaatattaaacactggatattaaaattataacgtacggtttatattaaaaataaaatccccgagctttcgctcggggatttctataatgacttattatatcttacttcacttcttctaatataataactactataaatcaaatagttatatttttatggtacaaatatggtacaaaaaagttattctttatttatgtattaaatatttacacataaaaaccttctcaactaatgggagatattataatttacaatctaaccaatattataatttttttgacttagaacagtattttataaataatcttttttattgatttattttataataaactttgtattcagatcgccagttttcaaaatataaatacccttaggaagatctgtaagaataattgtattatctttttgaaatggattttcaattgtctgtactaattgaccagtcatattataaatcaaagcaattttatattgtcctagattttttccgcctaacacataaatcttattatcttttacgggattaggaacgatcacaagactttttgacaaatctacatctgcaactcccatataagcaccccaaattaaagcgacgaactcaggacgatcgatgtatggatttctattaccttggtaagtgaatgccgcattatttcttgctatctcaaaaggagaaacaggatctaaattattccactcgagtaattgttttaattcccatgtctgtaagccagggtaggctgtactacctaatatgtttccgctgctgaaacctgatagctgcgtctcgtatctggttacaaaatataatatcattctggcaatatcacctttaaactcatcaattggttcaaaaacagtccccgcataacctgcagatactgaacttcccagtttagaaccgtttagtgatgtaaatgaggttgatcctacttttccaaaaggataatttgatcgcattccgttgacttttccgtcagtaggtgtaacaaaatggacatcagatctcatcggtaaattctgattaaataaactttgcggtacgacatgttctcggttgtaacagtctccttcaacactataatttccacattgtttgactccatgattataaatatatggatctgttcctgtcggattttcagaatacatatccattacagttccatcattttcgtagaaataatccctatctgtgctttgaaaagctgtcagcaaattgccatagccattatcttggtggccgttggtaatgatagttttcaactttgactttaaagaagctcctgataatcccgcagtgccatcataatagtttgacggagcctgtccataaacagaatttaatacaaggcttaccaaaagagttagtacaagttttttcattttgatttaaataaagggttaatattatggtttaaaaaatttgttgataatttgtcattttccgtcattatgagtgtgtgttttttccgaaggatgcgaatgaatcttaacatatttgatattaaaattgtatacctgatgaattaccaaaaggagcataaaaagaagccagccaacaataaaaaaaagatcttgagaagtaagcctgtgcttacctcttcgaataatttttcttctaaaacgtcgtttaaatcccatgttctaaattagaaggttatctgataattaatcccaaaagtattgctatgaccattcttttgataaagaggggcaagcatagagacagattttttgtttttattagctgataaaaacatattgattttcggaaatagccaataagctaattcggttgaaagtattcctaccccagcccccgctactacatctgttacccagtgtttgttattaataactctgtaaacacttgtgaatattgcaaatggatatcctgataaactgagccaataattactgtctctatattctctatacataaactgcgctgttgaaaaagcaattgctgcatgcccagacggaaaagacatattgttggatttatctgggcgttcttctccaattaaatattttgaaggtattacgattgctgtcgatattagctgcgatgttgcaagaataattgttctttctcttaaattatgcttgcctttcaaacctgaaatattaaatccataaaccatcacggcaggtatgaattgggtataattatccaatgtagaattatgaagattatggtcttttacttcttttcgtactcctgcatcaaattctttcattttaggaatagcgaaactcatcgctcctatggatattaaacttgtaggggctataagtctcttataactaaaattattttcaggtttttggacagcaatcgtatccccaattttttcacttactgttaagctatcctgtgctaaagccaaattgcatactagcataaaaaaaagaactggaatcttatttataatattgattatcattgcattaattgaaaaattagagtaaatagttttgttgaatattttcaataaacaacctgttctcggtttgagaactttattttaattgatatttgttggaacttttcttaagtgattagtgaaattagaatgctatgttatttttatttgaaattcattcgttggatgcgtacagcatttagaattgcaatcaatgcaacacctacatctgcaaaaacagcttcccacattgttgccaatcctccggctccaagaattaaaacaattgctttgaccacaaatgctaaaatgatgttctgccagacaattcttttagtttttttgccaatgttaatagccattggtatttttgaaggtttatcatcttgaatcacgacatcagcagtctcaatggtcgcatcactccctaagccgcccatggcaataccgacatcacttaaagcaaccactggggcatcattaacaccgtcaccaacaaatgcaacgctctcatttttggattttatttctttcaccttgttcactttatcctcaggaagaaggtcaccgaaagcgttgtcaattcctatttgttctgcgacatattttacaacgcttgttttgtcaccactaagcattgttgcctttacatttaaattatgtaacagttctaaagtttttttagcatcgtctttaatactatcagcgatagttatgtagcctgcaaattttttatcataagcaattgcaataacggtgtaaacaatttttgaaggatcaacatcatattgaatattgaacttatccataagcttgaaattccctacgagtatatccttaccgttgattacagctttaagaccatgacctgcaatttcctcagaattctcaacattaattgatgtatccaaatcgccaacatattcgtggatagcagttgccacaggatgggtactcttgctctctacaacattaaccatcttaaggatttcatttttatcaaattctgatttaatatcgacttcctgaactttaaatactccttccgtcatagtaccggttttatccatcacaacattttttatttcggcaatcttatctagaaaattactgcctttaaataaaattccgtttcgacttgctgcaccaatacctccaaaataccctaaaggaattgaaatgactaaagcacaaggacaagaaattaccagaaagatcaaagctctgtataaccaatctctaaaaatataattatcgacaaaaaaatatggaataagacatatcagtactgctaacacaacaacaatcggagtataaactcttgcaaatcttcttataaacagctccgtaggtgccttctgcgcagtcgcattttgaaccaattctaaaatcttactgagtttactgtcctcataagctgtattgatttttaccaaagcaacactattcatattaatcatccctgcaagaacagtctctcctttattttttgtatcaggtttactttcgccggttagtgctgccgtattaaaagatgctgaatctgaaataagctctccatccaaagcaagtttttctccaggttttaactgtatggtttgccctatctctgcattggaagctttaatagtttttgtttcgttattttcaataattgtcacctcatccggtctttgatcaagaagagctttaatattactttttgctcttgttactgctagtgtttgaaaaacttcccctacagcataaaataacataacagctacaccttcaggatattcaccaattataaaagctcctatagttgcgatactcatcaaaaagaattcagagaaaacatcaccatccttaatgctttcaaaagcttcttttaaaacaggaagcccgacaggggcataagctgctgcataccaaacaatacgaatccaatctttaaaccagtctggtttaaaataattatctaacgcaattcccaacagaagcaataacaatgaaactattgcgggaaggaacatctgaaaagtactcttatcactattgtcatgatcgtggttatgtccatcgtcatcggaatgatgctgtacttctttctttacatttgttgaacaacagccattatcctcaacaatgagttttttggctcctgcatccttataaatcttgccttcctgaggcgtacagcaaagctggttaccttgctcatcgtaagtgtgttgatgtttcatagaagtatattttaagtgatttttaattttttattttaaatttttactttgctccttctttgcaatccagtttttataccatttgaatttattcaggcttaatacaaaaagggtgagaacagttgctaaaaatgacaataaaaacatatttaaggcaagagccgctccaatagctgacgctgcccatagtgctgtagatgttgttaatccctgcatattgcttgatttatcttttaatgctaatccagcacttataaatccaagtcctgccggaattgctgcaagcattctggctatcgctgatttatcatctgtaagatgagaggcaaccgcaacaaaaagacaagatgccaagcaaagaatagcaaacgttcgtataccggcatctttatgagctgcttctctttcataacctataatgctgccgaataatatagatagcagcaatttgcctgaaagaataagttcaaattttatatccatgttgtatctaacattacttgattatttttgtttcaaaccttgatttttatagagataatatgcagtttgataatttgcgacagccttgttaatatactgatcagaaaaaatctttggtatctgttgattttgcgttttattatataaataagcttccactttctgctgagggctcaatatcacaagtttatcgttttccatatatcccaacttttgataggtacttacaaaaattctaggaatataattgtcgctcaaaacattcttaccataaaggttacttctgtagttccatcccattaaatcaaataaagttggataaagatcaatttgtgaacacattttttcaatttttaaagagttttggttcggaagatttataatcattgctgggatatgatatttggaaatatcaatttcatttttacctgcgctacttgcgcagtgatcagctacaatcacaaatactgtatttttaaaccacggcttacttctagcttttttaaagaattgtccgatagcataatctgtatattttattgcaccttccctacccgaaccggatggtatatcaattttgccatcaggatatgtaaacggacggtgattggaagtggtcatcacaaaatcataaaaagattttccttgtttatatttctggtctacctgtttaatcacttgattgtataaatcttcgtcacaaatcccccatgcattttcaaacgtaatttctttctggttgatcggcgtcctcaatgcctgatagttttcttttgccaaaggatttctcttcttatctataatatcatatccgttatttccaaaatatttattcatattatcaaaatatccatctcctccataaataaatgtgttatcgtaaccttgtgcactaaaaattgagcctatagttgtaagatgatcattatcttctcttctgacaatactgttgcctggcgttggtgggacagctaacgacaaagcctccattccacgcactgttctggttcctgtagcatacatttgtgagaataaaatgccaccgccggctaaagaatctaaatttggagtaagcccttgtttattcccgaaagtacccataaagtccgcgctgaaactttccattgttatcactataacatttggctttataagattttgtttgctggatatttttcgttctatagaaaggttatttgagaaaaatctttgattatcgttcaaatcagttctaactattttaaaagcgctttcgttatcaattagtttgtaaaaatgatcgtaattgatttcattgtttttataggcggagaaaaacgaataaattcctgccttagaaatttcattttgataacgattgacacttttatctgctaaactattactgataaacaaagagtatattatggtaaggcagaaaaatcctaaaaaaacaattagtctaaccgaaaatttatgttgtccgttaaatgaaaaaaagaatattttgcttttgtaaaacaaaataaatattaaggtcataagcagaagtatcgatgatatcaaaacgggtaaagggtaagactcatttatgttattaataacttcgtaagtatataccaaataatctacagcaataaaattaaatcggctctcaaactcctgccaaaatgtaacctcggcaaaaaatgaaaataaatgtataagaagaaaaataataaaagtgctgtaggtaataattttattgaataaagaccttatgtatttctgaggaaaaatcaatagataaaaactgtatggtagcagaaagaataatccaactccaaagtcaaacaaaaatcccagaagaaaaattttcattataggtaacagagataaatcagccttttgaaaactgactgctaaaaatccaaatcggagaagtaaagacgataccagataaaataaaaaagaataaaccagtaatgtgtaattgccccaatagttttgttttaatttcatatatctaaatatttgaaatgattaattgcgtaaaaaaatacgtaagtatgtaattcatcttgaatagacccagatttttataattcatagtctatttgatgttttagaaattttcccatttacttatttcatctattaatgcaagatggcacaactgctattatagatgaacctccccctcttggtgcccttcagtttcaatttggaatgtagtatggctaattttaaattcagaggtggctttatctgacaaatttttcaaaagtttattgagatcttcctgatggtcggctactacgtgggaactcatcgcattaacgccggaagtcaatgaccaaacgtggagatcatgaagtttaataactccttttacagattccaaagaatttctaagctcttctatattgacatcttttggagttccttctaataaaacattcacagcttctttcaagagcttccaggttctcggaaatattaataaccctatcacagcggaaataaggggatcagcataataccatcctgtcgtcaacataataactccggcaatcattactcctactgaggtaagcgcgtcagaaagaacctcaaagtaggcacccttcatatttaggctttcacctgaatcttttctaataatcatgattccgataatattcaccagcaagcctattccggcaacgatcatcatagctgtgctctgtacttcagggggatttttgaacctttgccatgcttcaaacaatacatatacagaaattcccaacagaactaccgcattgattactgccgccagaatttctgttcggtaatagccgaatgttttctgtgcatcggcttttctttcaccaattttgattgctataaaagcaaggaataatccgaccacatcagtaagcatatgagctgcatcggcaagtagcgcaagacttttagtagctaaaccgccaataacttcggcaatcatataagtgccacttaaacataagacaattaaaagatttcttttatgttttgcagaagccgaaatatttttattctgatcgttcataacactaagatttgtattagattaagcctacatttcataatagcttgtactcacttctttaactggtacattcttctctccgatcatttgcaaaagattgatttcaattgtttttgctaatgatgtcattggagtatctaccggtgtattttcaaaggggtcctgcattatgattgctgttttctcaatagctataaaaatcacaggtacaataattgtcgtggcaatctcaacaccaagttgtgagtcttccagtccaaatggcagaagaaatgcaaaaacgtaaatcaatgtatgcagcaaaatgctgtaggcacgagggaaaacagtattttttaaacgctcacattttcccatactgtcacaaaacctgatgaccatatcgttcatctgtaccaatttgtattcagataaattctcctgttctgccaatttcctaaggtgatcagaatgtttatctaaaagggcattgggaatatttaaagcattgatgttttgcgattctaagtattctcttactcttattgaaaaaggtacttttcttaaactttctcctaaagcattcagccagatgatatgtcgttctgcaaactcagatgtatcgttttctgagttagggaaaaattgttttattaatctcataaatgatcttgaatcattcacaatagcgccccaaacggttcttgcttcccaccatctttcataagattgtgcagtcctgaatgctaaaagtaaagagacagcagttcctaaaagtgcaggaatactcaatggtatggtaatttttttcaaaaaatcaatgtcgtctaaaaagcctattagaaaagcaaagctgacaatcaaaacgatctgaaatttaatctgtttaacaaaataccaaaccgaaattcttttgtttaaaagcataattgaggattttttaattattgactaaatttattttgcaacattgttttacgtttttttattacttttaaaataatgtatagaatcatagtaagaatacagcctacaataaaaatcatattataatgcgtatgtcttaggataatttctccggtaatttcaaaaacagtaaaaatcagaaacatggcaaaaagtccgtttttttcttttaatagaactttttttaaactgaagctaagatgagtatttctgaaaaggtataaattcggtataaaaaccggtactttatcagcccacttagtatattgctctccaaattttctttctaaaaattgctcttcagcaaaaacaatcctttcataatagacccaataaaaaaacacaaatgaaattacaaaccacagattttcagtaaacatcgcaagcccaagccacataaaaaaattacctaagtacaatggatttctggttgtactgtaaatacctgtagtgtttaattcatctgcaacctgccctgcttttgtatttcttcctgaagtattatgcggagtaaaaccaacagtatacactcttataatcaaacctaaaatgcttacagctaaacaaagcatctcaaagaaaagtgaacaatcattatcgtttttcagcaaaacattttggataaaaactcctaagccaagcgccagaacgataatcggcaaaaaacttctgtatctgaacagccaatttccctgggtttctaattcttgttttaaaggcataactaatatttttaaaatcaagtgaaatcaagataggatttcacttgattattgattaattaatgtccgtggtctcctgcattagaaagcttagcattcacgaagaatgcgccttttaccacaatttttgcatcaggtgcaattgcactcacaggcgtaatcgctgtgtaacccatatctgaagtcccttttaccacttcaattttttcaaaattcattttcttagcctgctcctttgcatggtttcctgcttcggtttcatttttgtgaccgtgttccgcctctccttcatcatgcccgtgaccatgatcgtcatctcctttttcttcagcgtgctcttccacttttttagaagtttgtacaaatacatagaatttaccatcggcttctacaatagcttcatttggaacggcgggagtttgtgaatttccaaggcttacatttcctgtaatattcattccgtcaatcaagccagctttgttcccggtaaccattgcatgaactgaaatcgttttactttcattttcaaaagatgatccgatgctgtacacttttgcattaaaggtttcttccggattgttggtgagcttaaactgcacaatctgaccaactttcattttgggaagatctctttcaaagacttgtaaatccaaatgaattgagctgttatcgatgatctccaaaaccggtgacgatacatcaacataacttcctatctgtgcattaatcgtactaactgttccgctgattggcgatgtaatgaccaagcctgatcttaggtttccattgcttactttcccaggactgattcccattagctgtaattgtctttgtaacgatgatctctgggttcttaaactttttagctccgcatcagaactttgcagattcttttttgctccggcatcattgtcaaaaagctccttttgccttctgaattcctgctctgcataagttattctgctgttaatagtcagatattgttcctgtaactgaatgtattcagggttactgattgtagcaataacctgtccctgtcttacataatctcctatctgaacggttaatgtcttaatgacacctccatacagtgaagtgaccgttgcctttctgttattgggtacacgaagaacaccatttgccttaatagttgaggctaaatctttcatttctaaagttccaagactgattcctacagatttcatctgttcttcagtcagttccgcaatagtttgcggagcttcttcgtgactttcttctgcctgttctgtttttggtttctcttctccttctgccggagcatctttttttccacagctgaccgctagaatagaaattaaggctagagatacaatgctatatttgattttcatttgtctatttattgatgattgaattaatgataactacagattcgttgacctgttgaatagattccaggtatttaagctgaatattggtggaagtctgcagtgcaaaaagatattctacataagaaatttctcctgttttataacctaattgtcctgctttggcaattttctcagcatttggaatcgcttgattaacgtagtagtcatactgattaacattttgctgatattgattaaatgcattttgcaattgcgcttcaagctgcttttgctggaattttgcatttgattctgccatttgtctctgatattcataagactggattcttgctttcgtagctccaaatgtcaaaggaatagaaacaccaattgttgccgaatgaaacctgtttcctccattgaaatactgatccatcccgttgatggtttgaaatcctatcaatgactgattagtatatccgatggtaaagtcaggaagtcccaaagatttttcaactttcttatttttttccgcaatctgcatttcctgataaaaagcttttacggtaggatgctgtgcaatggcactgctgtctaaaacatattgtgcttgtagcggatgatagttctgatcaaatggaactgaaatatcctcttcaatatttagcaatgtttttaaatttttataggcattggtaagataaacctcattctgtttaagcaataagttgatttcccctctctgtgtttcagctgtattgatttcaatttttttaatatctccggctttaaacctaaccgttgcaactctgataaagtcattgtataaactatccagattgctaagcttggatttattaaattgtaaatactcaatttgataataatacgttcgaacctgtttcgctaattcattcatagaaacttccctgttgatttgctttcctttaatctgttccgcaatcaactcttttcttgctttgaacaaagttggaaatggaatcgtttgggagatcgaaaatgattggtcaaatttcttagagttatactgccccaattgagcatccacattcattttcgggagctctttggacgttggaatcaatgcctgtgtagctttaatatccagatctctcgatcggattgattgattattctcaatagcagtacgtgtagcttcttcgactgttatggttcttccctgttgtgcactaaaagtctgtcctaaaaataaaaatcctaaaaccacaatggcggttaccgatttgttattgatcttttttaaattaatcttggtattaaaaataatatacaacattggtaagacaaataatgttaagaaagtcgccgtaaccaaacctccgataacaactgtcgccaaaggtttttgcacttcagctcctgcacctgtagaaatagccatcggtaaaaatcctaatgaagctactgttgcagtcattaaaacaggtcttaatcttgtttttgtaccttccattactcttttcagaatattggtctcgccttccttttccaattgattaaatgttccaatcaatacaattccattcaaaacggcaacaccaaataaagcaataaagccaattccggcactgatactgaatggcatatctctcaataataatgcgaatacaccaccaatcgcactcataggaatagccgtaaaaattaaagtggcttgcttaaatgaattaaatgtaaaataaagcagcataaagattaagaatagcgatactggaactgcaatcattaatctcttacttgctgcctgaagattctcaaattgacctccataggtaaaataatatcctgcaggaagttttacttctttatcgagctttgattgtatgtccttaactacactttcaacatcacggtctttcacattgaaacctattacaatccttctttttcccgcttcgcggctgatttgggcaggccctaatttgtaactaatattagcaacctgggcgagtggaatttgcgttccagaggcagtagaaatcattagattactaacatcgtcaatatttgttctgtgtaaactgtctaatcttacaaccagatcgaacctcctttcattttcaaaaacctgacctgctgatttacctgcaaaagctgtacttactgcattattaacgtcttcaatgtttaatccgtaattggccattctggttctgtcatactctacgttaatctgagggagtccgcttacacgctcaatttggggagatgtagaacctttaacagactgtattaccttagcagtcttatcagcataaattgccagagaatctaagttttcaccaaaaattttaactgcaacatcttgtctaatacctgtcattaactcattgaaacgcatttggataggttggttcttttcaaagaaaactccaggaatcacttctaatttctctgagatttcatcagcgagttcgtcatacgttttctttgttttccattctttctgaggtttcaagataaccatcatatcagtagcttccggtggcattgggtcggtaggtacttcagcagcgccagttttaccaacaaccatttttacctcatcaaactgttttataattcttgaagcctgcattgaagtttcaatactttgatttaaggaacttccttgtggaaggatacagtggaatgcaaaatcgccttcctgcaactgaggtataaattcaccacccattctcccaaaaacaaatattgctacagcaaagagagctacggttcctccaaccagccaatattttatttttaatgctttttccaataaaggctgataaactttctgaattctgttcatcattttatcagagaaattttctttgtggctcatcttttttgataagaataaagcactcatcatcggaatataagtcaatgataaaatcagagcgcccaaaatagcaaatcccacagttttagccataggcgtaaacattttaccttctactcccaccaatgttaaaatcggaatgtatacaattagaataatgatttctccaaatgctgcactacttctgattttggatgcagaaagaaaaacttcttcatccatttctgcttgggtaagcattttttttgatttattcaagcctaaatgatgtaaggtagcttccacaataataactgccccatcaacaataagcccgaaatcaatcgctcctaaactcatcaggttagcactcacaccaaacacattcatcattcctaatgcaaacagtaatgataatggaatagctgatgctacaattaaacctgctcttaaattacccaagaagataacaagtacgaagatgacaatgagtgcaccttcaattaggtttttttctactgtgtcgattgctcttccaaccaggtcggttctatctaaataaggttcaattacaacgtctgcaggaagagatttttgtataactggtatcttttctttaattctgttcaccacttcattactgttggctccctttagcatcataacaacacctcccacagcatcgacctgaccattaaaagtcattgcaccatatctcacagcacttcccagacgcacttcagcaacatcttttatgaagattggaacactgcccgtattatttttaactacaatgttccctgcgtcttctaaagatgttaccaaaccgattccacggataaaatatgcatttggctttttatcaatataagcacctcctgtattctgattatttttttcgagagcggtaaaaatatcagatatacttacgcccatcgctcttaatctgtctggatttacagcgacctcgtattgttttaactgaccgccaaaactgttgatctctgcaactccaggtgttccattaagctgtcttcgcacaatccagtcctgcattgttcgcagttctttagcatcatactttttctcactgccttttttgggatgcaggatatattgataaacttctccaagtccagtactaacaggggcaagttcaggagttccaacaccttggggaatttcttcttctgcttgttttaatttttcagtaaccagttggcgagcaaaataaatatctacctcttctttaaaaacaactgtaatcactgatagaccgaatctagaaatactcctagtttcctcaatatctggtacatttgcgatactttgttcaattgggaaggtaacaagttgttctacttcctgtccagcaagtgtgggacatactgtgatgatctgcacctgattattggtaatatccggtgtagcatcaattggcagtttggttgcgctccaaactccccaaataatcaataacaaggtcatgataccaatgacaatcttgttcttgatactaaatcttatgattttatctaacattgaatttaatttttattggattgcccaaagttaaaatcagtataaaactgaatttaaaagatgatgcaaagatgaataggattacagtgcaatgatattgcaaagtttccaagacaatttagatgaaagggaatccttccatcatatcaataaaaattatattttaggcggttgccagatttggtcgtacaccaaataagcgaagtcgtttttctgaaaatggattttcttagaaaaaaacgcagtagcgattcttgaaaaaactagaattggttcgattttataagatgccaccgtggttctgcaacagttgcaagaacaaaatggagaacaagaatctgccttcgaatgtgaatcttcttgtgtctttgaacttaaagaataattgaaatcttgcttaaaagactgagcatttgcactatctagacatggcattatggataacgccacaaaatagatgatgaaaagtagtcttacaaatttcataatgcaaatgtataaaatataattaccaaaaaaatattttatcctaaaattttaaggaaattatacatttgattatgccgaatcaaaaaaataaaatacctacaatacatctaagtcatttataattatagaaaaaaactgatgcttttagataaaattagatatgtacatttaaataatattgccaccataatttaattttaactcaatttttcagtaaactaattttcatttttttcaaaacaaaattatatattaatttacacttgatttttagatgaataatatattaaattcttatatcaatattggtctttccaaattataatacttctttaatatagatgtacatattaaatattcaaaaaatcatcttaaaataggttctaaaattgaactgaatttacgtaattttctttagtaacctttttctaagaactgtttctgaatctgtaaaactgactcttttgaagggtaaaaactaaagtaatctaaaacttttaaaattatagaacttgaaatatttatacctccctccagaatttctaatcgtgaatattcctcattaatagtgattttatctgtttttgtcgttcttatcttcataagcggcatgtgattctcgctgtccaaatgtaatcttctatcttttaactcattaaatataatagaaatactcaaaccttctttatataatccttctattgttaaatgttcaataaaaacatatagttgagtaagataatgtataatacttgtataataaaacaagtattgaccagaaggaaattttgatgcccaagcccctctcaaatgatcaccttctagccagtcttctacaaagctgttaatcatgcaaaaactctctgacaaatacattctccacagttcttttcgagctcctaaatcggaaaaagcctcgtaagaattttcagcagtaactaaactaccctcgtgtaacgttcttggtataaatggcaatgaccatgacgcctttacctgtgctttttcgacaacttcaagacatcttttaagactatgtaaattacctttttgaagaggagttatataaacttcgcaattgcctttcgattttattaattcatatgatgatgtctgctgaaaagcttttatttctgcgtcaaatatttctgcgtcaatattgggaatggtatagccaaaactttttctgcgttgcattaatctaacggctgccaactcaatgagatctcgcaaatcgctgacatttgatatggctgcgctttcaggtctcttatttgtatttctataatacaaagtacttgctctcatttctccgtccagagtttttttacaaagagttggaatttctttgaaagagaagatcttgattaccacatattttaattcgtttctatcttccggaaaatagacattgaaatctaccattggttctgcatattttgaaacctgatctcgcatttcatcatatttgtaagtgataatatttttctggtcaactcctacattaataaattcattatccttttcctcaattccaattacaatgtgacctccatctggtagatttgacattgccaagatatcttttgttagcttcttataatcccaaggactgtttgctttaaaatctagtgaagggctttccgtttgaccctcaatcaatcttataaaatcttctgtattcatttattttccaattttattaatatatttcccaaaaatatctcacgacaaaatgttaattatttaaattgaagtaattcttctcgtaacatataggctttaggagaacttcttttgactagaaaatctaaaataaatagaaagtcagctaaagtatttttatctctttttattttaccaccatatttataaaaagctttttcaacgaatttttctaaaatatcgttctcgaccagttcagcattttggctttggagcatgggaacaatccatgatattgagttaggcataaaattataaaatgcaatgccacttaaaaattttatcgatgaattaattctgttaaatcctaaagtaattataaaatctttgaaatataagcttttaccatccaatactgaccatttttcagagctctccacccagtcaatgtcaaaaagaaaaattggtagaaatctcgcattgctgttattgatcatccaatctttcaaaaattcccaaaatatccagaaattttcgagttgaattctacctatcgctgctctaataaactcttcaactaacttatatataaattttaaataatcatcagggatacttttttcaggtgtttctatacttgaatcaagtattttttttaagagaggtaatgataattctgtaggctgattcagcagatatcgtggataataaaaagtaaatgcatgtctactttcataaaaatccagcatgcttgatttgggatcatttaaaaaaacagtgtgtagtgtcagaacatcctgaataaatttgtggtgagcaggaagagccgtattccatgggatgatacgaagcatgtcatccaagtaccactgagtatgtaagtctaatgaaacgataatttcatcaggtatgtttatacttcctttgataacagaattaattagtacttccgaccaattgtcttcttccgacttattaaaatcacgagcacttaatttcccttgatgatataacattcgctttctctcgctttctttattttgtgcctttagaattacgatggcttctgctaatccataccaacagtttaaaacaaaatcaggttcaaataatactaattcctgtaaaatagcgtgctgcaaagcgattcgttccctggcgtcaagaccctttaaaagtaaacggaaaattaattctttaaccttcaattttaaatcttgctcaatatcaactttaaaaatatagcataatcctttaagagaaggtatattatccaataaatcaaaattaatagcgtatggatctgttttcgctaatttttttgcttctaaattgataatagtttcacaacaccatgcaatttcatcaggttgaagttgatttgaaaagtcacgaagagcaatagacgccatagtacctggagaaaccataatttctcgtctaccatctagttgcaaaataaattcatatcctattttccaagtttcatagttatgatcatcaacttcttcgtattcgaaaacttttcttgcccaagtcgtattagctgtcggaactgtataatcattcccactttctacaacatttctaattgtatcatcatatccgggaactacctgaacataattttcatatcccttttgattaaaatgtttaaattcatactttctagcatccatatcaaacaaaaactttttaaaaagccaatcatcttccttgacattctcccacattctgtcgacctgtttgaataaaagttcattatactctcgttgataaaacatatagtcagccacaaatccaactaaacctacataatacttattgcgatgaattctttgatttgcggcaattcgttcttttctttcgaattcttcgtcattatagacattgcttctcatcatatccgaagtagaccttgtagaatcccacttaaaaaacagtgggacacctaataaggagacagaagtttcatcaactaaattaggaaatgcttgtaaaatgctgcagaccactcctaaaatggcaatattgttagactctcttatcaacctgtctaaaaatatgcgtgctgttgaaaaatcttttttatccccaatttctaacaaagtcttttccaaagccatcagcactgatattaagaccttatcataaattgaaaatcctcggtacatagaccagtactcaggattcccatagtatacaccacacgatccatcttcaaaaacaacctcaatcctttccacccctctcttttttaaagacagaagaatttcataatttttttcaaaagcatcatttaaaaatggaataaggaaatcaagagctttttcaccgtgatacaaaaacatccaataaaaaaaagtctgataacctgatggtaatccataatcatattctaaatctttatttaaaccaaaatcatttactttaggctctcgaataagcatactattaatactccccggtgcatatttctcttccttttgagcccagtcttcagtagccatttgaataacttcttcagggaaaaagcgacaaatttgatctgaaataacacctccggtaatataagctcttatttctcgtagaaaagcaggatcagtccatctttcattacctgtttcaggaatcaagcaagcttgaataatcgaagcaataagttcctgatcggctgccgtcaatttaaaaagaattttaatatatttttttaaatattcagaagatctcctgcctaatctcctctgaattgaacgaccctgcaacctaaaaataaaatcttccaacagaaaagcagcgctttttgcaccagatggaagtatgccttggttaaattcagggagctgttttgaccatgattcaataagagtcaaatgttttaattcaaaattttgcagcttaatttcattaatattagctttgataaaatcaattatataatcccatccggagccaataggcagaagatcattaaaatttcttttttgaggatctatttttttacaactcgtttgtagtaaatagattatgcgatccaacaatttcgcttcatcttcaagaagctgtacttttaaactatccagtagtactttggaatgatttgatctaagtgaaacaatcagtagctcatctttccatgaaggggacaaagtatcatcacttaagagctcgtgcataaaatatacggaagcttccggttcatattcataaaactcttccatccataatctgaatgcccttctcatggcgggagtattttctatcgaaagtaaaaaatcttttgagtttgcaatctccgatttttgatttcttataaatctgatcaatgcccaatcttccaatatgtcgtgagaaggactgtaagcactggtatcggacatatcatccaactgtagaatattatctttaacaagatcagcagtcacactgttatcgctctcatatgttgtaaaaagagacatttctctagatcttttaagacaaatctcatagaaaacagttcctcgtcgtgattgattgtcttcaacaatatatttccacattaaccttttaaattgtaactcgtccaagtgttcctcacttaatagttctggtataattcgtacagctttatcaagataataaggagttctcaaaagatgcttaatcttagaattttccatcaatggcagtaagtcaggaattttttcaacgattaattcaacctcagcatcattaaattcacctacttgaaaataagcaatattttctggcagctcataatagtaatcgattttaaacttctgtaataagtagtctcttattgttaaaactatagttatatttttatttttttccagtatctgaagtagttcattaaatgctcccgagctacctgactctattagtttttcaaagctttctatccaaattaaaaaatacttatttgataaaggacttgccaatatttgttcgatactaactttacatccggcttttatcaaagcttcactaattgtttcacaatacaggttttcagcggtaaaagttaaaacactacgatctccagacattttcaaatcacttacagctgattttgtcaaagccgattttccaactcccgggtttccatgaaccactacaagattcttttctttaagcaattgcaggaggtctatattatcacgaggaacattaaaatctccgattttttctctagttctagaattagtggtttgttcatttttttccatttcttcataacttaagagaacatctttatctgtctccggtttgatagaattgatcagactgaacttaggatatggaatcagcttattgtatgctaaaactttggtcgccaaaaaaaatccaccgtcctcgtatgtatgaataatacctgtaaaataagtttttccatacaagatagaataagcgccacttccagacaatccttcaacattttccaaggcctgttgataatatgtatcgagagaattttcagactttagtgtaaatttatatcgattgctcttgatatcttcgataaatttcataggaaaagatcgatctgcctcttgatcattaaaattagcataccctctaatttgataatcttccaccatttcatcagtatcaattacctgacaaaaaaattgtttacctgtaagtggaagaatattctttttagaaagaatcaacaatgccatatcctcatcatcatctgacacaataacaatatctgtttcggtcaaattgtatgaatgaaattctgatgtttcctgattaaaaatctcttcaagtttaatatccgtatttacatattctttatcgaactttttaccttctaaacaatgttttgcagtcaagacatacacgtcatcaacatcaggactcgggtagaaaattactgctgtagcaatttcgtggttacatctgattttgattgtagaaagctgtggtatattttcattcatattttatgagttaagggcaggtacgaaagttctaagctgtcaggtcctatttgtgaataatcacattcaaatgtatatctttcaaaagcgtcgtcatcgacctcaaagatatttctcaattcttgagtatcacaagcaaaatgaattttgataatttcagaatttcttctctcgttcgtaatgattctaactatagtctctttatccggatgtctgttatggataccgtttccagttatcacataacaattggtctgaactatttccagcaatttagggcaggtattggctttactgccatgatgtgataattgcataaacttcacgggcagtggccgatctttattataccccaatgcatctaaactgtcaattatatcagagggatgactgtcggctaataagagtacttttaccttatcaaactcggcaagaacagcaatagagcttccattaacaggatctgtatccggtttaaattcattccctgtaagttcttcaattatttttttatggtcggattgattttcttttctaccaattttaccattactttcttcttctttccacaattctgttgcagcagcttccttttcaggtgtaggtgaaagaatggtcattttaaaaccaaaacattcaattggtaatgtttcagtatttattggcactgtggtaagaagattatttgcagttaaaaaatccctaagtaaaatcccgtcaccgactgagattttcccattagattcctttatcatctcaggagaatgattaaataaaaaattctttacagcgtcttgtttattttcaatttttttgtccacgacaaaaccttttacggcaccgatatggtcgcgatctatatggctgataatccaattttcaatttgttcgccagaagacaaaatttcttttattaatggggcaaaagaatttttgtactctttaccatatcctccatcaataagtatattatgccattgggaatctgttcctaaaaatctgataaaaatagcatcaccgccgccgatatcgaaaaaatgaaaactaatccgatgtgttttttgagtcataaaataatggttattaatactttcttattttttctaaaataggaaaagttaattggataagtaagagtttatttaaataattaaacgaaaggtcaaattaatcctttctttcatttttactgttgatttagcaattcgatgttcccagttttcctgtaaatcccctttcataatgagtaacgaaccgtgaggcaatggcaaactgtatttgctctgatgatggtctttttttctgaaatcaaagtttctggtttgacctaaactgattgatgcaatcacaggtcgttttccatagcggctttctttatctctgtgccatgccacggaatcattattatcacgatacaggtttaataaaacaccattgaactgatacccaaattctttttctatcctttcttttaaagtataaagctcgggagtccaaggattagttcctgaaacatttccgtctgaatcgtaagagctatcatttcctccataccaagcagtaaggcggggtgttacaactgttttatcatacatcttctgagttcgctgttcccaaggtgtcgttttcagcagtatatctttcaattcatcggcttctttgctgctcaggaaatgttccttgtattccaaaaggtcttttggaaatttataaaactcttccgtatcaaataaactcagctgactcattgcaattttctattaaaatatttatatttgatctggcccgtttatacgggatttttttcatcatttgtgtttttgcttcccttaggagatttttttttatgaagtaatgttaggaaacttatttttgagctttattcaaatgaattcaattcttatctcctattttttctttaatctgtttgatatcggtcttgatctctgtcataaagttttgaatattacgttctgcaaattcatcagctccatattctatcgtattgatactacaggcaaattcccagatctctttaatttcagataatggaattttatatggctcataaaattgattgtcagcttttacccatatactgtctgcttcatgaaactggaatcttttgtaactgattccatcattagtggtgatgaaaatataagtccggtccgttttcagatcagaaagattttctacatattttccaacaatataagttccgttcttataaggcggcatagaatctccgtccgctggaaacgctctaaacttcccaccttttaaaaaaggtaaggatatcgtttccaaactttctatgtattccggatctccataaccgttcagataacccatagaggctttttgtggaataatctcaatctgatcgtttccatcctgatcaaccctgataggcagaacaatcctattgtcagggagctccataatctcatcaatcgaatatttgctgacgttgatggtcaaaagtaaatcgatgctgatattataatatcttgaaattttcactaaaatatcaaggggtggcgctgcggcatcatcttcatacttactatatcggcctcgggtaattaaaagatcatcggcaaccttttgttgagacagattgagcttacctcttaaataccgcatgttttctgataaaattgacattgctataaattatagcaacaaatatacaattttttgctacaaatcgtgataattttgtcaaatggaacgagcgattgcacatatggatctggatacattctttgtttcctgtgaacggctgagagactctgtattggagaatcagcccgtgatcataggtggcggagatcgtggtgtagtagcatcttgttcctatgaagccaggaaatttggggttcgttctgcgatgcctttgcgaatggctttacgcttatgtcccgaagcgcaggttatcaaaggtgatatggagtattattccaaaatgtcacatttggtgactgaaatcattcaggaaaaagttcctgttatggaaaaagcaagtgtagacgagttctatcttgatctgtcgggcatggataagttcttcggctgctatcaatggacaaccgaaattgcggaagcggtaaagaaaaatacaggtctacctattagttttgcattgtctaccaataaaacagtttcaaagattggaacaggtgaagcaaagccagccggtaaattagaattaaaaccgctcgcaatacagccttttttaaatcctttatccgtcagaaagattcctatggttggtgatgtgacctttgaactcctttcaagattaggtgtaagaaagattgaaacacttgctaaaatgccagtggatgtgcttcaggaattaattggaaaaaatggaactgagttatggaaaaaagccaatggcattgatttaaatcctgtgattcaatattcagagcgtaaatccatatcaactgaaacaactttttccgaagacaccatcgatattccgaatatcagaagtattctttccggaatggttgaacagttatgctaccagttaagacaggaaaaatggctgacctcaacggtatcagtaagaataagatatgccaactttgatacagagactaaacaatgtaaggtggcttatacctcagcagaccacacattgctgaaatatattctggaactcttcaagaaagtttatacccgaagaatgagaattcgtcttgtaggtgtcaagtttacaggactggttcacggaagccatcagatgaatctttttgaagataccgaagagctgatctcattatatcagaccatggataaaatgaaagaccgttttggtgctaaaagccttggaagggcttccggttttttgactcaataaataaaattatgttcctcaattgtcatacctatcatagccttcgttatgggactatttctgttgaagaattagttgatctggctatggattataagctgaaagttcttgcgctaactgatatcaataccgtaacgggaatctatcagttttataaactgtgtgaagataaaggcattaaacctattgtaggcgttgatgtcagagttgaaaatgagcagtattatatatgcttagcgaagaacccgaaaggaatagctgaagtcaacaggcttttgaccgattataattgtgaaaatattgaaattccaaaatctaatcctcaattagaaaactgctttgtgatttatactttacaaaataaacctgatatattattggaacacgagtttatcggaatcagacaagatgagttaaaccttttaatcaattctgaattcaaatccctcactcataaaatggttatccttcatccggtaacgtttaagactgatgacgaatacgaacttcataaaatattacgagccatagatggtaatattctttttacaaaactggctgaaaaagattattgtagaaaagatgagttgtttatgagtaagaaaactcttctcgatcagtttaagcattacccagaaatcgttgaaaacacgaaatttatcgtcagtcaatgcagttttgattttgaatttaaaaccccgaagaataaaaaatattatactgacagcaaggaaaatgactttaaattgttatcccagcttgcttatgaaggtttatctcatagatatcctgataataacagacaggctattgagagagctgaaaaagaattaacagttattcatcaacttaatttttgcggctacttcttgattacttgggatattattcaatacagtaagcgtatgggttttatgcacgtcggaagaggaagtggcgctaacagtattatagcttattgtttaggcatttccgacatatgtcctctagagctagatttgtactttgagcgttttctaaacttaaaccgtaaaagtcctcccgacttcgacatcgattggagttggaagaatcgtgacactattttggaatacatttttgataaatatggaaaaaatcacgttgctttttgtggaactaatgtggagttcaagagaaaatcgagattcagagaactgggaaaagtctttggactgccgaaagatgaactagatcagctttcaaaaaaaccgagagaactacacgatcaaaattcaattgttcaagagatttataagtatgaacagttgttagttggatttcccaatcaaagaagtatgcattcttgtgggattcttatttccgaagaacctattacaaattattcagttttagaatttcctccaaaagaatttccaattgttcagtttgatatgcatacagctgaggatattggtctggaaaagtttgacattctttcacaaagaggattgggaacgattaaagataccgttaatctaattaaagaaaaaaagggaatcaatgtagatattgaagataccagaatctctaaggatgaagtcaagtgcaatgaatttttgagcattggaaagaccattggttgtttctacattgaatctccagctatgcgtggacttttgagaagattaaaatgtgataattacaaagtattggttgctgcatcatcaattattcgtccaggagttgcacagagtggaatgatgcgggagtacattttccgacacaatcatcccggtcaatttgaatacttccacgatgtatttgaaaaagaattaggcgaaacctatggcattatggtttatcaagaagatgtcattaaaattgcgatgcactttggtggagtttctgcagctaatggagatgttcttcgaagagctatgagtggtaaaggacgatcactttcagctttacaaaaattaaaagatgatttctttgaatcctgcaaaaggaaaggacatcctgagcagctttctcaggaagtatatcgacagattgaatcttttgccggctactccttttgtaaagcacactctgcttcttatgccgtggagagctatcagagtctgtttctgaaagcctattaccctatcgaatttatggtatctgctattaataatggcggtggtttttaccgaacagaagtttatgtacacgaggcgaagatgtcaggtgctaaaattcataacccctgcattaacctaagcgaatttcatacaacattatatggaacagatgtgtacttaggtctaatgcatattgaaaaacttgaagcttctatcaaagtaaatatcccggaagaaaggaaagaaaacggcgattacggatcattagaagattttataaaaagagtcaacattggtattgaaactttacagatattaatttttgtcggggctttcagatttaccggaaagcagaaacacgaacttttaattgaagcaagattcctactttcaaagaatcaatataaaagcaagatcatatcattatttgaggaacctcaaaaagattataagctaccgacaatagatagaaacccttttgaagacgcttttgatgaaattgaaattttaggatttccagtttcctattcgatctttgatttactcaagactaaatacagaggtcacgttttggttaaagatctcttgaagtatcataaaaaacaggttaaaatgctggcatatttaatttccaggaaacacgttcctatcaagatgagaaatcatcctggaaagaaagacgatatgtatttcggaacatggatcgatgctgaaggtgagtattttgacacggcacattttcccgacagtttaaaacaatttccctttaaggaaggaggagtctaccttttattaggaactgttgaagtagattatcattttcctactattaccattactaaaatggcaaaaatgcctttgattgccgatccgcgatattcgatggatgatgaaaaatctaaagaaatggaaagaagtctacgggaagacgttagtatgactcaccgaaatccctatccacaggaacatgaaattggattaccaagaaaaaagataaactgattctttagtattcttgttatttattttcacaaagttccagacctttagtgataaaatctccgtatgaaatttttaatccagcccatttgggatcatccaaccatatttcatcaactttactgatagcagcattattatgtgaaacacctttagcagttccatttaaagcatatgtctttccattgctggccttgcagtaaatttctttatatccagaacaataaacttcaacttcatcaactgaaaatggccatttttctccatactccagctttgaaaattttattgtatttcgctggactgggttagaacacgataatattaatactaaaagtaataaactgtaaatagctttcattttttaattttgtcaaagatagatttgaaaactaaattgacattacgggaaaccgtattactaagaacataaatagtatttatgacaaatcttctttactcacaacaataccaagctgggttataagaaatgtcttttgttcaaagatttggttcataatcatccatactttatccactagagaaaatgttttttgatggtccttattaataatagttagtaaacctgtgtaggtaatgctttttatcttttgataatttccattaaaaaacagtctatgatctgtaaaatcgtaagatttcaaaaccatttcaaaaggtttttgagtgtgtagattttttttaaaaaccattacagaatcatacaatcttatttttgtgccatctttattttcaatataaaccaaatattgctgtgtttcaggaagtataatttcattatcgtcatttgttttaacaactattcttgtgacctctggtctgctcacattgatcttgaaaaataaatctaaaattccaaattcaacttccttctgttcattatcattattttcagattctctcagctgcactatctttatattatgatgttctgcaaacatttgtgcatcccgagtaaatccattccttgacacaataattcctctttgtatatcggtatcattgatgatagaaagaagcttcataactgtatctttagttactttttttttccagtatttacattcgatagccgttttgtaagtttggcaaccatcaaactcagcggtcagcacatcaatttgatgcataacccctgaattaccttttattttacaattctgcccataaccctccactggaatatgatattctttttttaaagtatcataaatatattttgtcagagattcataaatcttccaatcaagactgtttaattcatccatcgtatttcacatcaaattacaacatataggtcttcatcttgatcatatatagccttccctgattttaccaaaggattccaaactttatcaattgcttctggcgtattccactcacaataattatcagattttttcaaattactactggaaattatcctctttccaaaaatttctctacactttagaagaaggctgatcgaaattcctttccccaaatagtacttactactgtcaggatataagtcaactacttttaaatcagtttcattttccatctctaataaaatgagactaaaagaatcatcactttcctttgactcttcatacacttcaaatacataagtaaaaccgttatatgtctcattaaacatataagtacatctagaagtaaattgataagtcacattatttttagtacttataaaaataaactttctggattcattaatctctaatatcatagtgtacattttattaaaaaataagattatcaaactgttaactaaacaaaaaaaattagaatttaagttcctccattagttttactgtcaaaataacttgacgctgttttgcaaatttatcaaatgatgaaaaatttaaatcattgggaaaatagtactttttcttattaattttatttgtagaaacccaatctgcaagttgctttgcaccttttgacttgttttcattaccatctaacatttggagattaataatggaattaaaatactccggatctgtaaagtattctctattagaatcagtcaattggatattatttaattttagctttttttcattgaaatttgatatcggatgacaatgatcaagattaaaatctccatccttatattttaagttaggataaagtaatgcgagtatgggaaaagcgtatctattttctttctgagtatataaaagattttctacaaactctttatcgacgtttatacttttattggttttagaaagcctctttgcaatagcggcagcagggaaaactgccggagacttagcaatttcttttttcaaagtatctctgatagcttttaatacaccttcagcttgcccgccaaatatttgatgtagcaaaacaacatgaagccattttttaataattgctctatcatctttatatgcaactttcttatgaaaatcttttactttatcagttttgtataaataatatataatcggaagaacagcatttaatgatgtcagtgtttttggagcatatccaaagtctacaataagttgaaagacttctttaattgctttcctaatattttcccatttactttcaaaatctttagcattcttaatactgaaattggttactctaaatttaatatcatcgttgtacaaaatcagataggtacgcaaaatcaaatctttgtttacggcaaagccgtattcctttacaatttcatcaactaatccattaatttctttgcgggcatctagaatcatccaacctgaaatagttgttgacattactaaatccgaataacttaagttaataccgcctgaatttattcgtataaaaatatctaatgctctggtaaaatcagaacctttttcaagatagtagtgaataagtttctcaagatgaacaatatcgtgaagccgactcaatatctcctgagcatcctgatcttctatttcgtgtttcttacaataagaattcagctgtgccattccgcgaatacccaaaatatctccgactttgaaccatttatttccatcttcattttttgcttctgaaggttttaaaaacaagaattcatattttctatcatcgtcactatcgtttaagtccttgctagaatcctttttatatttaagatttaaataaagatatcttgtaggaatagagtgttcattatctttccaagccagattatattcgtgataagcataagaacctttcaaccccagataaagtgcagtaaggcgctgctgcccgtctaaaacgacttcgaagctaggaagtttttttgtatcaacttcttctgatctattgaggaatctttctctatatttttttaagatcccataaaatcgttggttttgtgtgttattaccttcaactctccaaagcaacattgaaccaattggatattgttgcataagtgagtcaaataacatctctatttttccagatgaccaaacaaaatctcgttgaattgcaggaagtaaatattgattgtaatctattttatcgattgcatctgcaattgaaagcggaggaaaaaatgacataatttattttttaattttaatgtttttagctttaagaactttatgttgatcacttataaaggtcgagataacaaagagaatatcaattactactctttttatcaaacaaatatttgccttcttgtatttcgagatagtcgattacaaaatgcacaacttttctggcatccttcaggacttctggtgctagtccaggcactttaaattgattaatctctgaattataattaatcatttcactatcaaaattttcaatcccttttggtttacgtaatctacagtaaggatttataatacttagatttaaggtttcattcaagttccaggaattctcaatatttttattatagaaatctttgtgcttgtaatataagttagttaaaatcactaagtctacattattgtaatcagcagggtcgcaaaaagaaccattagtaaacagaccttcggggccgttaagataacctacccagctctgcatatcctctctatcaccacagcatattaataaaatattgatctcattttcttttgataaatcattaaatttttcgtgcgcgttaatcagaaaatctttaagattattatccatactttttaactcagaatgttctttcagagatttaccttgctttattaaaccttcatctatcgcattggaaagtattgacattatgtctagcctattgtcaagtcgaccataagtttgatatttgaaagattctgtattttgtaccttctctctattagtaaaagccgcacattttacttcaatattgtatgtgaaattgttagactgaaatttaacgtctacatctttttgatttttagggtttactttagcttcgaccctgaaaccatttttctcacaaaaataatttgcaactgccagctcacaggcactttgaatataagctttttcgtcaaattttgctttttttagctgtaacttatttccccagagatccttgaaatctctattggatataaactgtttaatttttgaaacagattcaataaattcatcaaaataaatatttccggaattttttgcaattttaaggtaatgaccatccggtacatttaattcattaaattcttctctcatgaagtggcaattagttttggattttaagaaaataacttttagaatcactgggaaagtgactcttagatttagagtgaatgacttagtttgctaaagtctcgcaaagaaatatgcaagatcaaagatttcaatttcttgtttttgattattaatatcatcaatatatattctcaaatcaccaactcttgttaaaacaccttccatttctttcttatcgtcataccaagaagttgaataaactacatataattctttaccaacaacagtttcaaaatcagctttttttacactaaagggatcaagaatatatttattaaaaataaggcactaacatacaatgttacaccattttttgattaaaatagacagcgttttgctgtcttaaattttttatatatttgtagtcgacatatcgacaaaacaaagcgtttgctttttattctaccttgcggaatctggtaaattcattttaggtgtaggataaataagtgaaatgctcatgccatagggcgtgggctttcctatttattacctaatggcttaccagagcctcgcaagaatacataggcaaagtcccacgctttctattttaataacatcacttttgggactaggtgaactaaaaatcatcttatgaaaaaagttttcttttccgtttttatgttattcggagttttttgtttttctcaaaacataagtaaaaaattcaattcagtctacaaaagatatgaatactttgattcaaatggaaatatgattggttatgagaaatacaatgatgttttaaaacaatatgagtattattctactaattctcaatctccacaaactcggcagccgacacaatatcgtgcgcctcaacaattaaatattgttaatatcggagacagtatgaatattcttcaaaatagatataacaataatgttcaacaggttcaaagtacaataaacaatatcgaaagtcaaatcaaaaatttagacatttcggattctaaaaaaactaaaattcaaaacaatttttctgaattacttgtaaaaaatgtatttgagaaaaattggaactacaattccgtaagtgaggttaacagaattatcaattggatgtatgatacagctaatataattatcaaaaatgtaacttctgaataagtttaattcttatatttgggaaaacttttaatttatggctaaaataggagacttattatatcagtttattgaaacagatattagcgaacgtcaaaatctaattcctgaaatattaataacattagatagtatgaaaagtacagaagtagacgattcatttaaagacgggattaaagaaaatctagtctaccaaatggaaaagaatatattaacttctgaggaaataggtaagcatctgttacaactatctatgctaaaatttcaataattctctcaaaatactttttgagtaattcaatatttttaggattcgacatacctaattctttatattttatagcacaatctaaacaataattgaaaactataatatttggattattcataatctaaatttatattgttaaataacaaagccccttaattggggcttttaggttgtatttttatcaattgagtaagtagtttttcaaattctacatttacttttgattctttgtctgtcttaatctttttattgagttttttaaaagctgcgtaatcttttgatagttcaagtaaaacgcaaacttttattgtacgcaataaaatcgattcgttttcaagataatctaaaggttcgattttgtctaaatcccgcccattcttgtttaactcttgtagtaagtcactatcttttatagtgtcaagtacataagttttaaagaattcgtttataaggctgttatctttaaatttcttgtcgtattgcttcttgtattcttgaaatactctttctttcatgtcttcgctgttaacgattgccaagttaatcttttttgttgagttttttctaagtacatttcaaatcttttgtctgtccgtagttgtttcgtgttatatctgaatatcatttcattaagatataactgtaagtgcttcttacttgttttgtaataaacacctatgattgaacgtttcaaatgtgaccaaaaacattctattgcattggttgttgttccttcatcagcatattgtttctttccgtggtcaacataagtatgagtgtggaaataatttcctatgtttttataagccgtccattcatctgtcattacatgagaatcttgtttgatgtgctgatgtaataacggctgtattgttttcgctttagtgtctgctactactattgcttttactaatcctgttgattcttctactgctccaaatacaggaactttgtctttgaacgagcgaccttgtgaattctttacctttttatcagcgtgacgatttttgtttttaccgcctacaaaagtttcatcacattgtacaattccctcaaactctttaacaaatgattcatgctctgttgcatatcttaacctctgcaaaataaaccatgccgttttttgagttacatctaaatctttagctaattgatagctacttatacctcgcttatgtgatgtgtagaggtatattgcaatgaaccaattttgtaatgatattttagagccttcaaaaatagtatttgttctcgcattaaaatactttcctgtatttttacatttgtatttgttattcttacatacataaacttttgacgtaacatcaaaagggctcacaactccatttttccaacgaagttgtgtaagataatcaatacatgactgctcattaggaaaagccctaataaggtctaaaatactattaaatttgagcatttgatatttgtaataagagatataaatttacgaaaaaattacgatatatacaagtaattaagtgataattcgtaatatttaacaaaattaagtgttaaatttaacatttagtgtaaaattgtatgttactgccaaaaataaatagaaagtcaaattcaaagtacatattatcgtagaaccaatcttttactgagagtctaagtttattaccatgcaaagaatgatctataatatgttcgtacccaaaacgatattcttttggctttggagcattaatccttaaaagaacgactgacttttcttggaaaatgattctgaatgggcttttctctacttgctttatagaatcatgtttcttgataactgagcaaaaacaattgaaatcctgatcaatttttaaattatttcttctcaagaattcaataatggaatgttgcataacgtaaattattagttttttataaatttacaaaaaaagcctgaatagatattcagactttagaatgttttaaacagagttattttttaggtgtagaaggcttactacttcctccacttgaagttttagcaggattgtttcccctatttcctccagaaggatttcctgttttacttggccagtttttgtttgaattactcattattttaatttgttttagtgcctactacttttaacgtcgatgttgggctagttttgacatgatcatgtaatcgaaatacgtgccaaatgttaaaaaaagttaaaataagaaattattttaggagctatccattataatcaaaatcagccaatggatgttttactctttcagcggtcggaattagagaattgaatcttattataactttaattacctgctcaattagaagaagttgttctttaccagtaatattattaggttggttttgaatcaattctaatttaacttttgacttatttattacggaagtgttatcttcaatttctaaactatgattcggcttagtgtgaattccaaaattgtgcattgtatttcgcaaatagaaaaaatagataatcacatctctttcataagctgtaatacctgcaaaaaaggaaatcatacttaataacttttcaaaagtctcctttatagaagttttattaattgtattagcccttgcctcaaagtgctttgctatagctctaaagttggtttcaatggaaataaacagagcattataaaaggcatctttaatgaatccattaaaattatgatctagatcaaccagatcattttctacaaatccttcccaaatattttcttgaagatatttaatatcacttaagtgtgtcgataatttaagagcaatcaggtaattttgaatgcttgatgcaatagcatccattgttatgtttctaacatcttccagatcaccgtgattattattagaagatgcaaaatttagtaatttcgatactagttcaatcttttcgtcaaattccatagatagttttttaatttttatattttatttatttcaatccgctttacttcaaatacgaaagttatctgagttttttgtctactaaagcaagatatttcattcctgattggtcaaagacattttccgttttttcaattttcatcgcggaatatacagcatttgcaaatcctggtaatccccaaagcatagattttaaatctccggtggctacaattccttgcgtggcaccaataatcccacatactgatccgaaaataatatttcctatttgactctctcccatttttgcggttagctcaccttttctaatcaccaattctctgatcttttcgttaaataaatctgtcccctctattactgtgggatcaagcacaagtaattcaactctgcttgtaaaagcatctaacagatcaccatgcttctccttgaagcgcaacattttatctaactttatattttgtggaaatgggatcaaactttctaaaatcgtctgcctttttttttggttttttagatttttaatactgtaaaaccttgaccttaaattatcagtcataggaattctgttcgtcttagctccaattatggtagctacgaacttcattaattgatctgccgtttttgtttccactgcataccaatttccctctgctctactggcaagccctaaattttcaagactatagaagacattatcatcaaacttatcagcgtgtattctggcagaagaaaacttctgagaatgcactaaattcctttgactattatagaatcgattttgtgctttttcaagtgaatttttattcttctcaatctcggtaacgaaaggttttgttacttcccaaggttcatcaaatatctcaataggatttataggaactatcagagacattctaacaagctccatcataaacgggtcataattccgttctggttgccaaagatattcctgaggtacaatcgcagcaatatccttgtaataaagaagagttcttatagtccagtcattatccggtacattgatataagggtaatataaaatatcactcatagtaattagtttttagtttttagtttttacaataatttggttattctttatctaagtcatttctttttttaacctgttcgtcatgatggtcattaattatggcaaataaatctttcatattccaaaggtttgtaaacataaaagtggaattattaaatccagaattaaagcggttatagattccctccgcaatatcagaaagttgctttatttcagcgaggctttcaacttctatctcaccaagtttatcaggatcgaagtgagcataataagagtctcgtcttgctttaattttctcaaccaaaaactccgcctgattaatctcttctctggaaatagcaatagcatttttaatatctgctttatgtttaaacagatagtcatattcaccttcactaccattttcagaaagcttacgatttttagtcagcatctctttgagttcttcgtcaaaatcgctgttttctaacttattcatcaattttttcaggctgcgtttttcatcctgaacaaacagtttagacaatgttagtgttgcaaaggaataagctagtgctacataatgccctaaaaaataactaaaaggagcaattttttctctgctttcattattttgctcaataatctcgtcaatatttgaagtgcagataactagatcacgaatcaaaatttggaaatactgcataaagctattcagctcatcttttgtaaaaatatttttcattaaactaatataaaaaattgtttttagttgtttctccaaacatttacatccgtgtagacaagctttttcagctcattaaatcgagtatcatccagatcttttccgcaaatgacttcatgcaagacccccgcgtaatctttaatttcttggttaacaatttttgcaactgtttccagttgatcttctgtaagatttatatttttattttattattatctaggttgataatctttaaggtttagttatagatttgttacagtattaaagaatttttttacaattttagtccagctgcaatacctaatccaaagaatctttttccttgatatgcccaagcatctgcattacttcctgtcataaaatcatatccataactaaaaataattcctatatcatttcttgcaatcgttaaacctgctgaaggagaaagaacaagattacttggattataagtagtaacaacttttttcttcagcggttcttttcccaagcttgctgatgagaatccgaatgaagctccgggagttaccgaccagctggtacttgacctgtgtgaaaaagttgtccaaccccatgaatatccaacagaaaaacccaaattaatattcccagttacgacattagcagagtactgattattattatagtcgacaactgaaggtctaacttttacacctatagcgttaattccgacaataacggtctggtaatgcagagtaatgcttcttgtaggatcgcccactttatctctactcaatttcacaagtttaagtttattaggagtagctgcattaataattctttcctgaccgtaacagggatctactgcgcctttagcatcagagcctcctttatcatgctctatttgccaagggtcaataaataattctccatccttattggttactaaacatttaaaagatttatttaaggcaggacaaaaactgtaattagtcgtagtaccgtcagtaatcacatacccttgatcatttaaatctttcaatttttctttagaaatgtgataacgaaatttgagtctgtagctgctagtttgtgaatgtaaaaaagtgatcatgctgaaaagcataaacaatcccagaataattgttttcatgttttattagttttttggttatgaggtaaatatacaaatataagttctcaaaatagagaaattttcatatccaaattacgaactaacttaatgttattaaaattaaaatatttctacttttaaactaataaattacaaatacaaaacaattttaaaacgaaataaacatgaacagacaaagattaatccgaaaattaagaattattaatcataagttgaataaaaaatacattccagtagaggataagccgtttgtgaaaattgccgaattaacagctatattgcctgcacttggattattttatttgtggcattattttgatttattaggaattagctactatcgatatttcaatctgtcggacgcaattgctgtactatatgaaaacctaatgttaatgattttaattggagtgttattctcaccaggaatcgtctgtttgttgctgactgacttaaagtcaagaagcaaaggtttatcaataattacattaattgtaattatcgtattattaatttgtggtttcggtgtactaatcaatatgtacaaatttgctacgccagtaaatattgtttttataacaattatcactatttccagctatgtttacttttttgaaagtcgaaatcttggattttggatgcatttagcattcgcatttatctatatgtacgcaaccgctgcacaggaagcaaagtatatattaaaagaaaaaccaaaatttacaatatacttaaagcaacactcggagcaaccaattcttacggaggaaagtagtacaaggttctatctttataagacttctaattactattttataaaagatgaaaaagaaaataaaatatttggatattcaatatcaactcaggaagaaacagttgttgtaccactaaccagatagtattaatgtaattgtcagtccttcggatttttttgatccacttaagactttgctccatgaagtattcttaatatatttgtggtaaacaaaaaataaaaaaagtataagaataaataaatcttaaatacatataaaaacattgcgttaagcagttattttctaaactcaaatactggtactataagaattctaagaaaatgtaactgcaagattcgcccttctggggcgtgttttgctgcatttcttagagggattataccagtatcctgagtttagagtgtcagttaattcacgctctttttttatgcccaaaaactacaaccaaaaactaaaaatataatgaaaatccctgaagtaatattggacggaatcaccgtaatactacggtatcaatttaaaatgacatccagtaatattgcaataaaaaaacaaaacacaaattatgcgaaacagtacaatttctattatactgctgtattttagtacaggattatccgctcagattccaaatctgccgacaggaccaagtgcatcgacttccccaattcaaaattattctgaaatatctttcagaaacaattctacgtcaaaaaatacggtatccattccctcagttaataattcttcaagaaagtcagaaattgaaagaagaaactgggaaatgcagcaaaacgattttaaaatcgtagagaaagaaaatcgagagaaagagcaaaaacagtttgaacaaaaagtaaataatctagaaatttccggttataatctgccatcactatcagctaattcaggaactaacttctattatgatgccttgtctcaacttaataatttagatcaaagcaattattcattagctgaagcgaatttcattgttgaaaatgcttattctgaaaggaagctacactattctaatttcaaagccaacatttcaaaaatagcttctcaggttttgcaaaaaatgaaatccggaaaggtgaccccagtcgataatactctgaaaaacattgctttgtttaagcatttctcaaagaattacaaatatgattttgatgattttatgggaaagaaagaatggaacaaaatgtttgtttccaaattactaaaaacaggaaaaggacaatgtcactcaatgcctctactttatttgatggtagcagaatcaatcggggcagatgcttcattggctatggctcccaatcatacgtatatccgtttcaaagacgatgataatcaatggcagaatatagaattgactaatggaatccttagtacaaatgctatgattttagaatccggttacattggctccgaagccttactgaatgatgtctatatgaatagtttaagtaaaaaacagcttatgtcattgttatatgcagacttagccaatggctatattcataagtacggaatggatgaatttgtcggaaaagcattggataaatctcttgaactttatcccaataatatgtatgctaatttacttaaatcaatgtatcagcaggcgcgatttgaatatgtagcagcagaattaggaattcaaaatgtagaaaatcctgcagaacttgaaaatataaaatatttcccgaaaggtctggaacttttaaaagaaacaaagatgcagttcaacaatatcgaccagctcggattcaaatttatgccagatggagcttattcagaatggttgagcaatatgaaccgtgaagccaacaaacaaaggagcgaagagcttgccgagaaaattcgtcttaccaatttagaaaaacagagaaaaaagaaggaagaagaacaaaagaaattggaggaagagcgtagaaaagcaaaagagaaaaaaagagaggaggaaaaaaataaacctaaacctcttctaacataaaaacatcaagatgaaaaatcaatattttagaaaatcaatgcaatttgctttgcttgtaatagtctcaatggttattactgtcaaagctcagcgtaatcaattttacgaggaggcctatgcacacattgacaatatgctaagtggcaaggaaaagtatagttttaagaaagctgtcttaagtgttgagcagtcttattaccagggaaagattgacacgatagcgattaataatgaactcaaattcctgaaatcatttgcagagcaaatagttaaaagcagagaactgacctatcagggaaatgataaagataaagtcagcaaatatgcggctctttactcgatcatctgccaaccgataccagtgattgtgaaagactctaccattcaatacaaacctttctcttacgattttaccgacgtctttggtcacgatgatttacccaatctctttgtttccaaattacttgcaacaaaaaaaggaaattgcaactcgatgccctatttgtacaaaatccttgctgaagaattgggagttgatgccaatctggctttagcccctaatcacgtctacatcaagcataatgtaaagtctttaggatggtttaataccgaattgacgagtggaattttccctgaagatggttggttaatggcatctggatatatccatctggacgccatcagaaacggtatgtttatgaaagctttggataacaaagaaagtttagcattatgcctatttgatctagcacaagcttacaacagaagctttccttccaacgatggcgaatttctcctaaaagtcctcaataaagctctcgaagtttatccaaatttcgcaaaagcacgcattctaaaagctgaaacgtataaagccagatttcaaaaattaatggatagacaagatctaaagagtgggtcttcaaataatatcaaactggctttagaaaatccgaaagcaaaagaaatatatgatctgatggttcaggaatacagtacgctttacaagcttggttacagacaaatgcctgaaggaatgtatttggattggcttgtatctctgaaaacagaaagaaataaatatgaaaataaaaaattaaaaaacaacttcaaataaccacgaaaatgaaaaaactattttatgtattctttttgataatcgcagtttttctcaatgctcaagtagaaaagaatgtttcaaacaatcctgaaaagatttacgtaaatcccgtaaaacttaccaaagaagaaagattgcgtccttatatggacgaagttctaaaaacgagggatactttaacaccagccgaagcagagcggagaagacaaaacattgaagcaggaaatccttttaagaaatatggcttctatcctaaaattgctacattaagcaaaggtaaatatttagaagctcacgacttagacagtattgtaagcattggatcagtccgttacaatgcaagaaccaatgaaattgttgaattattagatatcaacatagaaaatgctgactcacaaccatatcttgatactgcaggtcgctggttttctcctgatccactaagcgaagaatacagacgttggtcaccatataactacgcaatgaacaatccattgcgatttattgatccggatggaaggtctaccgaagatgcagttgaagaatcagaacaatgttgtctttttggtataagtggattagtgagatttatgccaatctttgaaggtggctcaaatgtgaggcctaatcctgttgttgaaacaatgacaaaaactagtgaagcaactacaaaatctcaggaacattttaacagaggtaggcagatggaaccagagcaaataaacagaatgaatgaagaaggacaaaatgttacaaagaatactaaaaattttgaagcaacagattcgaaaacaggtaaaacaggaggaacgagacctgatggattcaccaaagaaggaaatcctgtggaaataaaaaatgtaaaaaatcaatctcttacaagacaattaagatttcaggacaatttagttgatggaaaaaggctaattttgaggataaacaaggatgcaaatttatcaaatcctttaaaagattcagggattgaaattcaaccttataacctaacaggaccagctcctgcaaaaacagataacattagagtaaataacaacccagctccaaaaattaaacctgtcccagtaaaaaaagatccttgtgcaggaataccaggttgtatttaattaaaatattatggaagacaaatatattacaggcataaaacaagttgtcaaaactgctcaagcatttttaaatgaatttaaagagtttgctccatttggtttaatatttaaaaataatgaatggattgatcttggcgcatatgacgaaaaccttacatcggatcaaatgaaaaattttttaattagtactattatagaagattttaatgagggtaacactgagtttggagcagtttgcgtagatgctaaaattaaagaaatcggcgatgttattattatttacaatacatcaaatggtaaggattggtttgaattagtttataagtattatctcgaaggaaagtcggttaaaattatcgaagaaaatatcgagtattaatcccaatgacattattgaaaatgtcttataatatttttgactaaaagattggaaataagcagaacagaaatagaagagaaatttttacaacattcagttcaacacggagtactttatgtaaacggagattataaaaaagcaaataaacttcacaaagaattacataacctttataaccatgcaaaggagcaacgtgaagaagagctttttagtgaaatgttggataatcctgacgaatatgtaaaattgtgggcggccatttttactttaaaatcaaaacctgatatagctgagaacatcctaaaaaaattatctacaaattcgaaagtaaaaatgacagcctctgcgactcttcatttgtggaaagaaggaaaattagaactattattatgagattatgaagaaaatagtagacattgaaactgcattaaaaatgtttgaggaggcttcaattattcaagtagaatctacagaaaatggtaattttaaagtaggaaataaaaattacgagaaggtaatgaatgcagcttcatttcttaaaaaccaaaattcaatagaaagtttatttcagtttttaaaccatcagcataaaggtccgcgattatggtctgcctgttatatcttacatcttgatgaaaagaaagcggtcaaagttttaaaagaaataataaagcaatcgggaataattggttcaacagctgaaattactttagacgagtggaaaaaaggaaatctaacatttatataaaataattatagaatctcaaaaagaatggatactcaagattatttacaagaccaattgaaaatttgtgaaaagaattctcaaatttctgatgtagtagagttaaataccgtaattgcattgggtcgaaattttaatcccaacattcaaataaatggacttagacatccccgaacaaaaggtttaactggttggtatatttggtcaggtgagttttcttatgcagatgatttttttcagccttctcacgcctatcatttgttggaagatgcttcttttataattcaatatctcgggcttccggctggtaatcgttttttaatagatagtaacggctacgaggatatttggtatgatgaaagtttgttggatgtataatcttataacttttaattaatttcaatcatcaacaataaaataactatgaaaacaaaacttcttttcttgctactaatacaaattatatttgttagctgtcaaaaaaaggttactgattttaagctcgtaagctatgatataaaatcaaacaacgaactgtccattagtgcttataccactttggacaaagatggagttctaaatgtttatcttgatagagaaagagataaagtatattatcaatataaattaagccagagtgaacttgatgaaatcaatagcttatcagataaaaatttggataaatatgtaataaaaaaagcgctggatgcaaatcaaggttatgcaggcagtagaaattacttaagttttaaggtaaatggaaaggaagacaaaatatgttttattttaccttttatggattctgattttaagaaggtaatagattcgctggaagacaaaatttatttgcaggacgaatctcaaagaactgaagcatctcctatagatttcaaaaaagtagaaaaagaaatcattacacagaaccaaattgataattatcttccaagcaagtcattaccacctcctccgatgcgataaatttcatatatttacaaaaagcataaatatgaaagcaataaaaatctacagtattgtagcaacattggtaatagttggactttcagtctgggtttactcaactaaaaaagaattaaaagaaacagaagaagttcttgatcaatgctctgatcggtattatcaggaaattaataagtaaaagaaatcctaacaaattagttaggatttttttattcgtcaatcttatatttattaatatcgaaatcaaagtcaaaaagttcttttggggtaataccaaaagctgatgacattttcaacatcgtttctatagttggattgccctttccattttcaaatttattgtaattgcttgaatcgaaatttgaattctgcgcaacctcatccattgagttatattttgtagctcgaatctttttcaaattttctgaaaactcaagcataaataatcttaagacttctttgctatccataaataatgtatttatgggcaattttggatttttgatttgaaaattcgtggtaatatattaccatacaataaataaaattactatatttgtaaaataagttacagaatatgtaattttgcgatacttcaaagaataatagaagctattgcttagaatctcaattcgaaaactggtaattttagtatacgagacgataagcaggaagctcacgacctaggcgtgggctctcttatctgtatacaaggtataccagtaccccgaattggataatgtagagttccacgccgtctttttccaatgctgttcgcttttctacttctaagcaccttccaaaaatagtatcagattatatgatacaatgaggtgtacaactcattgcggcttttaaagctttctcgggacacaatttcattcatattaaatggcttttaggtgccttgcggttaactaacgactatcccctatccaaaaggcactaagaaagttttgttttcaaatacctgaatccagaagtaataataactaaaaaatgaaataaaaaataatccttataaataagaaagcccttccctattcagtttgcagacttcaggaaagagctaggtttatcaaggagtttaatcaaaaaacccatacaaaactatgaaaaaatcctattctaaaataggaagcattggtattgtctttttgttaactgcattatgcagtaatgcaaaagcacaaaccaagacagtgaccggaacagttactgtcggcgagaatcagacaccactttctggagtcaatgtatctcaggaaggcagtgatcaagttacacagaccaattcgaaaggattttacatcttacaaataaacggtgaaaatcccatcataattttccgacatcctgagtatgcagaaaaaagaattaccgtaaatggtaaagctgttattaatctttcattagatcagaaagtacagggcattgaagaagttgttgtcaatgccggatattataaagtaaaagagaaagaaagtaccggtagtattgcaaaagtttcagcgaaggatatagaaaatcagcctgtgactaatgttctatctagtgttcagggacgacttgcgggtgttactatcactcaaaattcaggagttcccggaggtggttatgatattcaaataagaggtagaaacagtttaagaaacaaggacaacagcacaattgatggaaatcagccactttatgtgatcgatggtgttccgatgggtggagaaatgacatcactctattcgactgttattctacccggaagaagtcttaatcctctcaacagcatcaatccaaacgacattgaaaaaattgaaattttaaaagatgctgatgcaacagcaatatatggctcccgtggtgctaatggtgttgttttggtaactactaaaagaggaaagtcaaaacgactgaatttaaattttaatacatcctatggattaagtacagtgatttctaatctcaatttgattaatacatcagaatatttatctatgagaaaaaaagcatttgaaaatgatggaatcagtacttatcctgcaacggcttatgatatcaatggaacttggaatcaagatagatatacaaactggccggataaattagttgggaacacagcagctttgtcaaacacacaattatcattaaatggcggtggagaaacaaccaattttttattgagcctttcaaataatgagcagaccactgtttttggggaagactttaaatacaaaagcaaaaacatttccagccatatctcgcatcgatctgcagacaataaatttcagatgaatattgccaatagtttttcaattcagaaaaacaatgtcattagaacagatattacgaggcaggcgtacaatttagttccaaatgcacctgagctttacaattctgaaggtggattaaactggcagaataatacatttgccaatcctgtggcagcctacaatagcacctatacaaatgaaaacaagcaatttcttaatagtattacaacacagtatgaggtttataaaaacttattgctaaagcttaatggtggatttaactaccagacatttgaagaactttcgttacagcccaatacaatttataatccggcttatgctgcgggtcagtcaagcgcaacttcgacagcatctaagaataatcaggacagattttctttcatcattgaaccacaaattaactggaattaccaatctgaacatcataaaatcgatgctttggcgggaggaacatttcaaagagagacaaacgaacaagggtcaattgtaggtgtaggctttgaaagtaatgcttttataacaaatatcggtgctgcaagaacaaaaacagtttcagaccaaatcacaaatgaatacagatacgccgcattttttgggaggcttaattatcaatatttaaataaatatataattaatctgactggcagacgtgatggaagcagtcgctttggtccaaataaaaagtttgccaattttgcagcagttggaggagcttggttatttaaaaaagaaaaatttgccgaaaatctagaatggttaagttttggaaagcttcgcggaagttatggtactgcaggtagtgacaacattggagactatcaatatttagatacttatactgtctcatcatcatatatctataattcagttacaggattgattccgtcaagactctataatggtaactatagttgggaaaaaactaaaaagctagaagttgctttagaacttgggctcttcaaagaccatattaatattacgacagcttggtatagaaatctttcttcaaatcaattggtgggctaccagctgccttcaatcactggctttacaagtgtattggcaaatcttgatgctacggtcgaaaacaaaggatgggaatttgagttggcagctcagccactaaaaacagggtctcttaaatgggatactaatttcaacattagttttccaacaaacaaattagtttcatttccgggactggaaggttcaacgtatgccaatcaatttatcattgggcaatctacttcaattatcaaattgtatcaacttgaaggtatcgatcctaaaacaggaaaatacagttttactgatttcaatggagatggaaagatatcttcacctgaagataacaaagttgctcaggacataagtgtaaagttcttcggtgggtggtcgaacagtttcagatataaaaattgggacgtttcatttttgtttcagttcgttaagcaaaaaaacagaaattacaacagtattataactgttcctggcagtatgaataatcagccagtcgaagttttagatgtctggtcaacggacaaccctactggtacatatatgccatatacttccggagtaaacacgcttcacacattttttcaaaacagtacagcatcagtgtcggacgcatcatttatcagattaaaaaatgtacaattgggatatcagattccattaaaaaacagcgtcttcagaaatgtcaaaatatacattcaaggacaaaatcttctcacggtaaccaaatattttggtgttgatcctgagtttttagcactgggctatctgccacctctgaaaacatactcttttgggttacagttcaatctttaaaaaatttgaaatgaaaacaattacaaacattactatattattattctcactattactactcaatctgatttcttgtgaagagatgctggaagttgatgtaccggaaaatcaaattgataaaaacaatgtttttcaggacactcaaacagcaaattccgcattatcggcattatattcgagtttacgagataattctctactggcaggtgataagatgggattatttttaagcaattatacagatgatctcacttgttatgcaactaccgcaacaaatggaatctatgaaatttcacaaaatcaactcatttccagcaatgctgcagtttattcactgtggtcaaatacatatcaacaaatctatttctccaattctatcttagaaggtcttgaaaaatcatcaggaatttcaaacacagacaaaagaagaatgaaaggtgaagcattactgatacgctgtattttatatttctatttacagcaaatatatggagatattccttatttaactacaactgattacactgctaacaacacctcatcaaaattgagttctgatgatgttcttgttcgacttgaaaacgatttgaacgaatgttatatattattagcagacgaatacagtaactccgaaagaatttttgtcaatcgtaaagttgcagaactgatgatggcaaaggtatattttgcagagcagagaccagccgatgcggaagctaaattaaaatcaatagctcaaagttctctttatactttcgaaactgacattgctaaagtctttcaaaagtcaggaaaacatattttgtggcaattaaaacctaaaaattcaggagatgcaacaaaagaggcaagtttatattatttcacaggtgcagcaccttcgagctacgcactatcgacatctcttatgtcctcctttgcatcatcggatttcagaaaatcgaactggatggcagtaattactgtgggcgcaaacacttggtatagagccgataaatataaaaatcgctcaaataataccacagagtactccattgttttcaggcttgaagaagtttacctactattatccgaaagcttggcaaaacaaaacaaactcaatgaagcactgctatatttaaatgctacaagacaacgtgctggactttcggcggtaacttcaggcatttcacagtctgatttaattactgaaatcgcaagtgagaaccgtagagaattctttacagagatggggcatcgtttctttgatctcaaaaggaataacaatttaaattctcttatttcctcaaaacctaattggcagactaatcatcaactgtggccaattcctcaaaaagatcttgaactaaattcaaatttaaatccccaaaatccaggttactaatgagatcatttaaaaatataataattttactgttacttgtagggatttctttttgtcaaggtcaaacgttgagaggcacattagaaaaaaaaatggctcagcaatatcgaataaaaattcttgcgatgtctccaaagggaaactgggttatagcaggaaaacattatgatattaacaaagatactattgaaattttttcaacaaagaataaaattcaaaaacctcatctgttaacgaaaaccttagatattccaatttttttacaagaagaagctgtggtagcattggcaaaagataaagctgtcttagttagtctgaatgatagaagacagaaggtttttgacaatattaaaagagtttttgcgtcttcagacacaggaacttttgcattactaaacactgccgataaattgtctgtctataataacaaaggggcatcatactacgaaatagatagtgtagtcaatattacgaaagataatgtaagtaaaatttttgtcgtaagaaagggtgaaaataaatacgaaatctacgacacttcttcccaaaataaaaaaaagatctacgagagccctgtgcttatcaagagaattgaaataagtgattcaaagaaaacactttatataattgaacaaaacagtactgataaaacggaaagtttagttttattagatatcaaatctggcaatatctcaaaaccaattttacaagatatagatactggagattacattgtagttagtgaaatgaatgaagaaggaaagtattttgtaaatggccaaacgaagataccaaaaaacaaaaatgtcgaaatatggtatggaaatgatggtgatttaagcaagcatgacactggttttgatccaattgacaaatattggataattacaaacaataatcatgtaagcgcaattgataataaagattcgaaaaagatttttttatctggcagtgataaatatcttttcgcttttaaaagaggaaaacttcaaaattatacagtagataatcaaaatattgatttacagattttagatactcagaataatacagccaaaccctttgatattgtaaaaagtgcatatttcactctatccaaagatggagaatttagtatttacagagacttgcaggataaatgggtgttatgtaatctttctacgatgaaaaaaggatatattcaagatcacagtctgcaaaatcctgtttttagtaaagacgcgtcattaatttactttgattctcaaaaaggtattttcgtttataatattcagaaggatagactgatcaaaattagcgaaaatctaagtaaaaaagttaaaattttgaataaagagagtctaccattaattgggagctatttcaagatttacagatcgtacctaaagaatgataattcagttttaataaaagtcagagatgacgaagaaaacaaaacgtcatattataccattgtaaataaagatttaaaatcaataataaaatcctcagaaaattatattagagatttctactacaacagaaacgcaaatttttttgcttatacattagaaaattacaacaaaccgatgtctttatattacgttgatgatcataaaaaagaaccaataattcttttaaccaatgaaaatcgagatgctgcagtaaagaatcttaaaattgaaataataaattatattaattcggattatcagaagttgaagggtattttatattacccaactaactttgagcctaaaaaaaaatatcctatgattgtaagaatttatcaaattcagaatgattcggcaaatcaatatgatattataggctataataatcctgcttcttttgatttgagaactttacttgaccaaggctatttcgtttatttacccgatattgtatttggtccaaaaggaacaggtctttcagcattagactgcgtcaataaagcattggatacaattcagaacagaccgtatattgatcagtcgaaaatcggattaacagggcattcccatgggggatatgagacaaactttattgctacacattcaaaccgttttgcagcgtatttatctggtgctggtaatagtgatattgtacgttcctatttttcttacaattataatttccacagcccattttactggcaatatgaaaatggacaatatgaattgaaatttcctttcagtgaaaacaaaaaattgtactttgacaacaaccccatttataatgttgagaaagtgaatgcgcccattcttttatgggctggtaaaaaagacgaaaacataaaatgggatcaggtcatggaattttatattgggttaaaaaggaataataaagatgttatagctctgttttatccaaatcaggggcataatccaagttttaattcagaggatagaaaagatctttattatcgaacattagaatggtgggattattttttaaaagataaaacaaacatagattggattaacaaacaaatgaaaaaggatgctttatagcatcccttttttactgcagtctgaaaagttcctctccgcacattgtcgggttgtccgaaattttctcgtgcaaagacgaactgctgtcgcccgaccaaacacatggggctgtgcccactgtgttacactgttgttgtgcgtttagacattcgccagtaacggcatcaattctgtaagcgtcaacaattgcttttgctgaattgctttttgcagcactagttgcaaatgctgcgcctgtgccaagtaatactgtgactacaggaatcattaattttttcatattaaagaaatttgaattattgcctactctattttaggttttcggcattccccttttcatataaattaagaatcagtctagtaaacttgtatcttttcaattctttgtcaattaaaacaaaaagatacatgtcggttgcatacatctgtgttagcgctttatcatcctttttaggaatataaaagcttcctacatattcctgtcggtcaatcctgtagatatcaatgattgaatttttcttccatgctttcttagactcatacttgccaataagctttgattccacaaaaaggaggttttgattagttgtaggattttgattgttttttaaacttggaacattcattttatgtcgaccgtctggaattttaaccacattaaatctagctcggcttattgtgtcaattgtttttaagcgagatttcaattcaagatcctcatccatgatcatatattcatttctgtaattatatatgtatataagatttttaaaattttggttgagcaacaattttccgtcactgtcaaatactccgtcaatttgtttttgaagaatatctggattcaatacaacttttggatttcgatttaaatcaaggctacccaaagtgtattgctgtgtacttttactctgcgttcttagtgcaaatctagccgaatctaaaacggataattgagtaaagtatgcgttctgataacttattgtttctgcatattggtcaccaattttacctctgtaaattattgggacacttccatcgtaaagaaaataatcgtttttaaaggtctgaagccatagatttttaaaggaatagtctttctcatccagctctatcctttgttggcttaaatttgataaatcataattaatttcagaaaataataatggagctgttatatttccaagatatatttttttactatctgagcctgcaatatagtatgaatccagctttaaatctattgatttatcttctagtactggatgtattagaaatcttctaacaaaattattctctttttttataatgtattctgaagaataaaatagataaacaacaagagaagtactcgcgacaaagactacaaaaattttcacaaaatagatgatgaatttttgtctattaataacctcaactagaattacggaaataaaagaaagtaaaatacatccaagattaaataatagatgttctgtccaatccattttctcaagtatcccgccgcaagaacagggaacaaagtcgctaaaatttaggataagataaatatagattgtaaaggctatcataattcccatagagctataaagcccaattaatcgaaatttgggaactataagagtaactacaataagaagctcaacaattattgttgcataagaaataaatccagcataagcacttaaaagtggtgattgtgcgatctgaacctggaaatttccaaaatccattattttgcttgcgctagcgtagcagaataaaagaataaaaaaacaggccgttattagcggcacttgaaggaagactgattttttcatggctaaaaaatttattaaaaaactttaaaatcaaaatctgccctttcattattatcttcttcgtcaatttttgaaagatttccctatacccgatctaacgtcgttggctggatattatatttttgaggtatagggaatctttatatcatttcatttagtgtttccaatcttgaccatcctttacagggggatctttttctaattcaattttcattctagttgaatcagatgttttattactttcctttgcaactctagatagtgcaaaatcattatctacttgctcatcaacttgtctgcaactttgcgcacataaacccacaataagaattaaaaatgggataacttttttcataatagtaaaatttattaaggattatcccggccggtttttctcagaattcttggagtcaaaggtattgtcgaaaagaccgtccaaacaagcatatgtgggtgtgctttacaaagcacgacgtcgtgttttataaagcacgacaacaaaaaacaatgaaaccgcttcattatcaattgtttttaataataattaaatatcttaatagaatattgggaaaagccctgttttatggagattttacataaatttggcggttcttaattgaagcctactaaccatgcttaaaggattttcattcattttgatattattccccttttttctgctgttaaatgcgcagaagatgagcgaatatgagattatccgaaaaaattatgagaatcttcctaaaaatgataaaagagcaattccttatgtaaagacttatattcaaaaatcgaaaaatgaaaatgattttgaacatttaacccaaggatatcgggatgccgttttctttactaaaaatgaaaagcaaaaattagtatattccgatagtatgatctatgccgctttaaaatcacgagataaagatttgataggtttagcttatttgggaaaagggattatctattactttaactataaaaaatttgatccggctttagatgaatatttaaaagcttataactatttaaaaaatactaaagacgagtatttgaaatataaggtcgtctatcatatgggagtcgtcaaaagctacctaggctattattcagaatctaaagaaaatttcgaagaatgcattaaattttttaataatgaatcagttaaacaacttcatccaaatgaagttttcaataataaaaggggatattttaactctcttcaccagttaataatctgtcagagaaatctaaaaaattttgctgctgctgatagtttaataaatgttgggctaaaagaaattgaggggattgatgaattttctttggaaaagagttattttttaaagtgcaaaggcatttcagcatataaccgtcaaaattataagcatgcaatcgatatcttaaataaatctttaccaaaaatattgaaggtagatgattttgcgactgcatcattaatttactcttacttaggaaagagctactatcattctgataaggaaaaagcactccattattttgagatggtagattcaattttcgttcataaaaattttgttttaccggagacacgtgatagctacgaaattttaataaaccattttaataacctgaacaacacaaagaaagagctgtactacactaaacagctcttatcagttgacagcttattaggaaaagagttttactatttgacctcaagaattcacaaagaatacgacacgaagcgattgttagataacaaagaagctttagagaagagaaatcttctcacttccttaatggtaatattttttatatgtctttcgctgctttttatcacactatacatttttaaatataggaagaataagaagatcatgctgaattacaggatactgcagataaagcttgacaatcgtcagcttgaaaaaatgctacatcaacatagtcccgataccatttacgaggatgagaagacatcgataattagtaaggagatttaccaagatttactattaaaaataaaatcatttgaggatagacaagaatatactcaaataggattaacattaaatcagttggcggctcaattcaatactaatacaacatatttatcaacttttatcaacgaatcaaaaggcgttaattttaaaaattacctaaacaatcttagaattgattacattaccaatctaatgaatactgataaaaattacttgaaatacacaattgaagcattagctgaaaaatgcggtatagcatcccgtcagaatttttcagatcttttttatgaaattaatgggatgcgtccaacagattttatcaaaaaaaagaaagaagagcaaaaaaataataacggtaaatagaaatcgaaaatactaatctataattttcaagtgaattttacataattttgatgatctaatcaggagaagaatcttctcgtttgcaaattgaaatgtgcgaatcctaattaggattgccttaactattttaaaaaattgccaaatgaaagatttaaaaacctcaggcagatcaaagactgcacgaattactttaaggctacatgacgaagtaaaagaaaaatggctgaatcactgtaataaatacaaccttcatctttccgattatatcattagcggcgtcgaaggaaagctacttgataatgacaggaaagaaatcatgaatttcatcgaaaatcaggttaatttattctctaaaattgagaataatatcaatcagattgcaaaacatatcaacaccaacaagcacttacccactacccttttatctgattataattcaaagcttgaaattctcaacagtctgaaaattgagcaaaacagaataatcaaaaaaatctatattgaacttgcaaaatgattgttaaaatattaaacaaatcatccagtgagttcaatggtgtgatttataatgacaagaaaattgaaaaaggaaagggagaacttttatcaattaaaaatttcccggctcatcttaatcactcttcgggagctccagacataaaaaactatctgaaagcagtttccaaaaataattcaagaataaaaaatccgcagtttcacgctacaatatccgcaaaaggacgcgaatattctaaggaacaattggcgcttacagcagataaattcatggataaaatgggctatggtgaacaaccgtacattgttgtttttcataatgatactgccaacaaccacattcatattgtaagtacaagggttaataaagacagctcaaagcgtattgagagagatttcgaaaaatataaaagtcaaactgctttacaggaaacaattaaagagttgtacggtactgacgtacatcaaaatttagaaaaattgattgattataattatagtacgttacatcagtttaagacactgctggaacttaatggatacggctattatgaaaaaaatgataagttaaatattacaaaaaacggcgcttttatcaaagttttaaatgtcaatgatttaaatttttcaaaaaaaagttttgacgagaaaagaaaaaaacagatatttgctctattcaaaaaatacaaagaggtattttccaactcggttttcagagtatcggataaaaaccatgcctcctaccaatcagagcttcaataccatctgaagaaaaaatttgggattgatgttgttctttcattcaaagatgataaacagcctttcggctattccatcatcgaccacaaaaccaatacgatttacaaaggcagtgatataatgaaaatgagtgacctattcattatcagctcccaagtattagacaaaaagatctttgacattctggccaattcaaatttgacaatcgaaacgaagaacgtttttaaaaagcatttggaacaagagtacaaatgcgaaatccaggattatatgctttttttgaaacaatcgaaaaagacaaattataatatctggaaagacacacgaaattcaacaatagatcacatcctaaacttaaggaaagtaagtaataattcgcaggataaaataaagatcgtcagtttctcaaatgaggcattcgtcattaataagattgacaatgttgtctttaccgtaaaagaattggtcggagattactattacaacctttatttatctcaattactaaatcctcaaaatccaggacaccagtctattgtcaatggcgtgcaagctgcagaagcatcaagtttagaagaaatgttaaaacgcacttccctatttgatatttcagcagcttctccgccatcaagcgaagaactagaaaatagaagaagaaaaaagaaaaaaaagagatgattattacgtttgcaaatcagaagggcggagttggcaagaccactttagccattgcatttgccaactatctttctatgtttaccgataaaaaggtaaatgtcatcgactttgattttcagcgttcattttacaggcaatggtcagaagacaaagaattaaaagcagattatctttatgaagtagagaaaatttcggaagaaaatattcatctcacgcagaatgaaaaagttttaatgcagttaaaggaaagtcaggaggttattctttttgataccgccggaaatattcagaataattacacgcaggtattacaatacagtgatgccataataattccttatggatactccagtgttacaatgatgtctacagtactgtttctcaatcttcttaagcttatcaaagtcaaggcaaaaatatatttcatcagaaataatatgcgcaaagacgacagctacgaattgaaacctgtaatggatgctgaattcaatacgatagggaaagtaattggcggatcagttctaaccagaaaatgtatgcttagcatcaacacaaaaggactgacatatgaacaaaagttagctgtcaaagaaacattcgatgaattaatttatcatctatgggaattttagaccgctatacgaccgatgaagataaagaggaattagcaaagaatctcaatattctgagtgacgaggcagtcttatcgaaaaagggcattaaacacaaaacagcagatgcagcaaaaaacactcggacaaagaaaaaaccaaccaatctaaccgaacttgatgataaaaccttatgcataattaatgaatttgttgactcttacaagagtaatgacaaaaccagcagaatgataaggatacaggatcatcattacagaaagttggtgggccttcgtgctgacgggatatctgtaagcgaatttgtaagttttgcggtgcatctcgctctaaaatctgacgattatgaaaatttcttaaacattttaaaaaagtgaaaatttatgggaaaagtcctaatgattactggtttactatacattctatattataccggcattgcagtttatgacttatttataaaaaaacagatcgtaaatagaaatgaaaatgatggcgaattgatcagccttgagaactttattgaagaaactccaggagaaataataaatatttatgaagatgacgtagagaatttaaacttaccaagttcctatgattatgaagagacagaattatcctccgaagaaaacggcgaaccttttaaccatcgacgttttgaggaagagcgggaaattgaaaacttctatggcgacaatcaacagggcaaagatgaaaaagaagtgcgtcaatcatttctttcaaatttaagttcagtgatcggaagcaaaaattcggaggcaatacctcatcagaaggaaataattccgtcagttatttcggatgagatgtttcgaaatttctttgaaaaagcatcaagacatatcgttgtcggctctgaaagcggtcagagtttttacaaatcaagtttagttttttaattacattcagtcaatgatacggaaaacgccgtatctgtttcgattccaaagcactttatggagctttggaatctttttttaccagacggtttcaaatgaaacaattcaattattgttcaattaaaattttaaaaatcaaatgaaaaataatattacaagcattaataaacaccataaaattaaaaaagcgctgttctccgcaatcttggtattatgcacaaatttactttttgctcagacaggaggcgccggagctatatcttcggcaacatcggatatcgaagagtacgttgagccagtctcaaacttagttcaaatgataggtgcgatcgtaggcattgtcggaggtgtccgaatttacaacaaatggaacaatggtgaccaagacgtcaataaagaactgattggctggggaggtgcctgtatcttcctgcttctcgttcccacagtaattcaggcattttttggaatataagaaatggaagaaaagagtttctttctatacaaggggctaaagaagccccttgtgtttaaaggtctgaaaggaaagtatatctattatgccggtggttcatttgccggcacaatggttttaggcatcattctaagcaaagttataggattctttatagggatagttcttgctttaggtattggtgcaggattgatttggaatgtcttcagattacagaaaaccaaaggtctttttaacaaaacgcttaacaaaaatgagatttttatgattcctgtaaaaataaaactgaagcagaagtacaaacgttaggaaatacacacaatgaaaaagaaaagctttagtctgccatttattggctacgactacggttcagaatttaatgttaattatgatgttcttatcggtgaatttggaaacccgatcattgccatccaaattaaaaatattgtcacacagtattcggcagaccgtgccttgtatctgaagtatcattcaatactacttaatattatcagtattattggagaaggatatatcgttcagaagctggacattttcgataaaaagatctaccaggcggaagcacatgaagaatatttacagcaaaaatattcagaacattttgcgggaagaatttacaaaacaatcgatagcattctggtatttacccacaggatcgatcaaagcaaaaagaaaaaccagtacaaatattcagataaaaagtataaggaattgcgagacaaagcagaaaaaatctttatgcttctgaaggaaaatgattttgagccccattttttctttgaaaagaattttgagtattacatctcctctattctttccatgaactttggcagatcaacaaaagcttttgacaatataaggtcacttgacagtaatctccagattggtaattcctatgtgaagaccatttctttagtagatgttgaaaatattgaactgcccaatgaaatttacccttacacaacgttgggtggaaacggagctatcaaagataccgcagttgacaatttttcttttattaatgacctggaactgtacaataccattatttacaaccaaattattgtcattcctgatcagacggaaagagttaaatttttagccaataaaaaaaatcgtcacgaaggatttcagaatgaacctttgaataggatctgcgccgaagaaataggtattttgctggataatattgctaaggacggtcagcttattgttgacgcacattacagtcttgtcaccagctgcccaactattgaggatttggaaaaaatccagtcgatgattgagaaccagctctttcaaaaaggagtaatttccagtaaaaattctttcaatcaattggagttgtttcgagcatcactaccggggaatgccaatgaactaaaagaatacgatttgtttaccacaacgagtgaagcctcgctgtgcttttttttttaaagagagctaccccgtagatgaaccatccagtttttacctgagatttacggacagacagggagttccgttaaaggtcgacaccgctgatctgccaatgcagatcggcagaatcaataatcgaaacaaatttgttcttggaccgtcaggaagcggaaaatcttttttgatgaataatatcattgaacaatatttagcctacaattatgatgttgtaattgtggacaccggagacagttacagcgggacggcaaaatataagaatgggaagtatattcagtacaccgaagagaagccaatcacaatgaacccctttgtagtcagccaatcggaatttaatattgagaaaattgagtttctaggaaatcttatttttctgatatggcagggtgcagattcatcgatgaccaccacacaaaaatccattattgataatctgctcttagcgtattaccatcagtttttcaaaggtggtaccaattggtatcagcaaaagacctcgcgtgagctgattctatacctaagtaaatacaacatctacgaagatgatctttataatgaatttgagagccaatacagtgaaaatgaaaattactatcaaattttaggaataccaatggatgctgaaagctcggacattaaaaaggagtttcgaaaattggcggtacagtatcatcctgataaaaatcttgataaagctgattttgatgattccatattcgacaaaatacacgaggcttacgaaacattggtcaataccgaaaaaagaaagacttacgatgaaagccaactgatcctttcaaatactaaaataattgaaagacccaaaatcaacagtgcggagtgggaaaatgccttcagaaaatcactcatcaaaaaactggtagagcttgaagaaatgctagacgtggaagaactttctttcaacactttttatgagtattctgaaaaatttcttcctatttatctttccaataaaaagttcaaaatttctgaagctgaattcaacctgagaacattcctttatgtattggctgatttttacaaaggaggtaggtatggaacgactttaaatgaagatgcagacaactcattattttatgagccctttatcgtctttgagattgataatgttaaagataatcctaagctgtttcctattgtaaccctcattattatggatacgtttatccagaaaatgcgtctgagaaaagataggcgaaaagcactcattattgaagaagcctggaaggcaattgcgagtaaactaatgggaagttatattttatacctgtataaaacagtcagaaaattctggggtgaagccgttgttgttacacaggagctggatgatattatcgggaatgctgtcgtaaaagacagtattattaataattcggataccttcatacttctcgatcagacaaaattcatcgataattttgataagattgcaaaattgctctcacttaatgaggttgagcagagtaagattttcaccattaataatctaaataataaaagcggtagaagccggttcaaagaattttatcttaaacggggcagcaaaggtgaagtatatggtaatgaagtttcactacagcaatatttgacttatactactgaaaaacctgaaaaatctgcactcgaatactatgttaatgaatatcgaaactatcaggatgcattggagcagtttgttctagatattgatcatctgaaagacggtctaccaaacttggtatcattggtaaatatttaccaaaaacctattgacaacgggttaatcgaatactatcattcattcaaaaagcaaaaccctagtaaagatttcttcaaaagtatcaaacggctacttatagatcaagatataacgctaaaggaatttattaaaagcaaaaatcagacttatgaaaaaatatagcatcatactcatggtctttatcatgagtttttataaaacacaaactccctatatagatgtactgacagctcctgctatgattttatatgccaatcaaattaaaagcgagcaggagaaaacagtcgacgagatgaataaactgcagcaggcgcaggcggttgtctcaactcagatggttctggccaacgatctgcagaataaattgtacaaaggattaaaagaggtaaatggtactttgaaaaacggcattcaagttcagaatatttacaacaaccttagcaaaataatcacgaatgttgatgggatatataacgaagtgcaggatgcaccggagtacagcatatttgcgacaaaatcaatacagctggtaactaacaaagcgaccgacatttatactgatgttgctgatctgctgacaagtggtgagctgaatcttgcaacttcaggagatcggaaaaggcttctgtacaatattgaaaataacacccgtctgctgaatgtctatttgatcaacgtaaagatgacgataaggagagccaaaagaaaaggattctggaaatctatcaatccatttcagacgtatgtcaatactgacaggcatatttttcagcaaatattgaacaacgcaggaacattgggactatgaaaactttatcaaaaactaaagtctgtttcctgattctgattttttcaaatatacttaaaggtcagcttactggagggaattatatctgctactaccttattaactctgaaattcaaaaaacaatggatgaaaatgagaagcagaaagaaatgagaaataagcagctgaccaatttaagtctggaatcagccaataaggaacaatggagcaaatacagggatgtgactgaaaaaattcgtggaaggcttaacaacctttcgtttgcagttcaggctattccgacatcggtgaacatcgtcagagaaattgataagatttatgagatacagtcgaaaatttatactgaattatctgatgccccaatctggattcctgtcgcactcaatggtcagtatgagtttataaatagtctgcagttgtatatcaggctgatggcaggtatagttttatcgtatgggacgataaacgaaatggaaaaggccgaacgtaaaattcttctggattttgctcaaagtgaaatcaagactcttcggcagcagtcctactctacccttcagaaaatcatcaatgtcaagagaaaaataaaactgcgtaataacctgcttcaaaattgggtgaacagggacaagaaaatcattcaggatatcattaacaatgcaaatctttattaaaatgaaaacatttctaattgtattttttctgcttttactgaataatgcaaagtcacaaacctattatcagctctattataatttagaactgcaggctcaggtaacggccaaccaggctgcaagagtagcttctgaaaagctttaccaaaattcttacgagaaacaaagaaaagcttacgatgatatcaagaaaaaggctgtgcaggttgtggtcataaaaaatcacatatataatcagcttcgtaatgtcaattcagcactgaagcagggaaaacagcttgaagccatatactatgattttaccaaacttattggaaacatggagaaaatgctggagctttcagctcaaaaacctcagtatgccgtattgattatgaattattattctaagctttatctgcatgcgatgaactcatatgaaaatataagcgaatcggttctcaatgaagaaaatgattttcttatggacagctacgatcggcagaaaattctttcaaaaatacagcatgagataaaaattatgaatggctggacagttcacattatcaattacctgaggaatgctgaaaaaaaaccatacttccgtcatattggtgttttcaacagctggtatatacgggacaaaggtttaatccaaaatattattaataattataaccagaatttaaacggttggtaaaattataatctatgaaaaacatactattaatactatcatttcttccccttttatctttcgtaaagggacagaccataaaaagagttaaggacaaacacattgtaggtcaggagaaaaggcaggtcttttatcaatggggagactggcagcctgaaccaaaatactttttgggcatacagactaattatgcctatgccatggtatggggctggctggctccaagtcgaaaccgtgattacaaaggcggaaatgacatcagacctttaggactggcgggattgcaaaaccaaagatatgcaacaaccttggtacagcaggacaaaacaagcgatattcaggaagaagcaaagacaacatatgaagaaaacctgaaagaattctatcattattccagtgcgacctcaggggctgatcctctttatctgctttattataaagatgtactgaacagtctggataattttgacaccggatcttcggcattatctcagtggggatttacttcttcgaaagcctgggaacgattcaataattacggcatcatcggagaatgcaggcgaaagatcaacgtcattcaggacaaatacaaatttgctaaaagtgcagatatgccgagaggcaaaaggattcttgcctaccatgactgccttatcgaatggcgaaaaatgaaaaaatacctagcgtacttaaaccagcagggagagaacaggtttagagccgaagttaaacttgaaagttacaaaacaaaaaatcccggaaagattacaaaagaacggagagatgcagagatattcatggatgtaatgacggggcatttatagttaaaaaaattatgaaacgaaaaaagattttaaaaagcattatgaaaataatgcttttattcattccgtgctttgcattctcacaggatacacacagtgatgaatattaccagaaagcaatggattttctgcagggtgagggcgtattggaaggctggtttactgaaaagttcctaccgctttacgacagctttatgaccgcagaatatggacaatttatattatttggacaggctgtagcgggtttaggcgcactactctatctggggaatataggatggcagatgataggcggagatcgtgaatgggaaatagtaccgatgctaaaacccttcgccattggactggttattgtgaattgggtatcatttgtcggtattctccgtactcctctaatcaagcttcaggacgtctcagagagcagctttgttgagagtcagcaggaattgaattctttaagatgggtacgttttaaaaaacagcagcaggttgtagacagaattgttgaagagcaagctaaagcacaagctgaaatccaacaacaggaagccggagaccaatctttaatagaagaaggactggatatggttggagatggattaacaagtcttatgagtcctgtctatgaactttatctcagattacaggttggtttacaattagccatatcgagcgcgctggaattgattgggttatggatacttcgaatatgtgtctatgggatattttttatccagctgatattttcgaccatcttaattattatcggtcctataccggttgggttatcagtttttcctgcgttttcaagttttctttctcaatgggtttccagattcatcaatgtcaatctttacggatttgtggcatttattattttaaaaatcggaaccctccttcagctatttgcctttgaggcagaaattgagagatatgatcagattatcaatacagacggcagtataaagaacatggatttgctgcttacctattctagcagtgggatcatgtcatttggattggtcatcgtctgttttttaattacagccgtaggaatattatgtgttcctaccctggccaattatatcattccgtcgggcggtggtaatacaggagccatgagtaagatgaaaaaagcaggaatggcaatagccactaaaggagtttcattattaaaaggataattatggcagttgtaaaaaacattgaaaaaaaaatcaagatcaataaagtaacttccattggctgcataattttatcagtcatcgtcgttattgcaggatttgttttctcatataaacagataaaagatgcaagaaaatccatctatattttagataacggggttcctgttttagtcaagcagaccgatttgctcctaaacagacctgttgaatataaagctcaagtcgatatgtttcattctttatttttcacactttcagcagatgacgattatataaaatctcagacacgaaaagcattgtatctgatcgatgacagtggtatgaaggagtatatgaatctgaaggaaaagggattttacaaccagatcatttcttccaatagtgtgatgactataaaagcagacagcattaaactcgatgagcagaacttaaaatttatttactatggcaaacagaccattaaccgaaagacgcagcttatcgtcagaaaattgatcactgaaggttttttgcaagatcttccccgatctcccaataatcctcatggtgttctgatcgaaaaatggaaaacattagataactcggacatttccgtaaaagaaaaatttagataatggaacagcaaaataaaatcatcagtaaaaatccatcaaccatatggaaaagtgtggaacaatttgcagaacgtcagccgaagagaacattttatctcatgtttggattgatttttttgtccaccctattctcaattggaagcttgatttacatacaaaaagtttccattcctgaatacgaaacgatgaaaaagcaaaatgtcctaaaggatgctgctacctcattcaactcgccgtttacagagacagaaaaaattctgggtataagagaagcgctgaaagaacttgattactatcggaaaaaaaagatattgagttcttccgatagttcgagaattaaatatctcctcgataaatacaatataaataattcaagatgaaaaaactcaatttaaaacaacctaaatatgttcttcccctcatcgccctgccattcgttttaatgatagggtatttttatgttcaattcacggaaaactcaggaaaagacaaaaataaactggctgagagtaaagacatttccaccgatttcggaaaagttggagaacgctctgaaattaaaggaaaggccgacgcttatgctgatttctttgataaaagaaccgatggaagaaccatgattgacggtttcggtgatgagcatgaaagtcttgaaaaatttgatgatgatctttcagagcgacagaaaaggcatattgacagtatgaattatgtcagagaaaaagaacgtctgaataatctttcccgacaggccaatcgacagtcctactataacgcgatggatgctaaacagtcgaaagaacgtgaggatgatcagtacgacagaagtatgaaaatgttaaaaatgctcaatggtgacaataacggggtaaacaattcaggaaaagctgatactcggagtgctgaaaattccgactggaaaaaggatcagatgaccttgatgagagagcagatgatgttaatggatagtatcgaaaaagcaaacaaccctgaacttaaaaatcaagccaaagccattgagaaaatgaagaaaaatgagaaagagatggatttttttctcaattctacattggatgtaacaaaagcctcgaaaagcacagaattcaattcgatcttcagacaacgtgaaaataactttatcaaagctgtgatcgacgaaaacattaagggctttgcaggaagcagaataaggattcgcctactcgaagatgtatacgtcggaaatgcaaaaatatcgaaaggtactcccctttacgcattgatcagtggattttcactgcaaagggtgaaccttaacatcgtatcggtaatgcatcagaacgagattcttcctatcagtctcaatatctatgatgttgatggcatggaaggattgtatgtcccaagttcggcattccgtgaaatgacaagatctatgggagaaaacattgtgcaaggtcaaaatctttccagtggtagcgctgatttttttaccacgacgcttagctcagtatatcaatccacctcaaaaacaatatcggacgtaatacggaaaaacaaggcaaaaattaaatacaattctttcgtttacctcattgacaacaaagaacttgaaaaaaagaaaaagaacatttataagaaaaacaccaatccataatctatgaaaaatttcattattatccttatgctgatgcttgtttctacggagacatccgctcagaatacagtactatcgagagtatataaaaataatcttcccgaaatctatattacaggtaatgtcaatcttcatttcaggagcccccagcctattcagtttgttgatttaagtacgaaacaccttataggcgatcttcctacagaaaatgttgtaagaattaaaatacaacagtttgaagaggaaagccattccgctaccgacagtattagaataaaagaggaaactccgatttattattatgataatcaggaattaggaattgttaccattgtcggacaatcctttatggctcagtacaagctgatctataaagttgacagcagtgcgactataatgaccaacattgaaattttacctgaagacatgcaggctcttgaatatccggattaccagatgtccagtgccgaactcagaaaatattcggtggagattatcagaaaaaaagaagcaaataaaatacgtagaaacagagatttgggaatcgaatcgcagcttaataatgtatacgcttttggtgattatgtatttctagatattagttttaaaaacaatacaaatctcatctatgatattgacaaacttaagttttctatcgatgataaaaaggtttacaaagccacgaatgttcagtctattgagatagagcctgtattccgtctgtatgacttaaagacatttaaaaagtcttacagaaatattttcgtttttaagaaattcacttatccgaataacaaggttctaaacatcaggctgatcgaaaatcaaatcagcggcagaacaattaatctggagattaaatactcagatattttacaggctgacactttttaatattcatttacatctaaagtatagcagacagctgggaactcctggctgtctgctttttatataattcaatttgagaaacaatgcaggaaagtaaagaacaacaaaaaatctacggattctttcagaaagcagtctatatgctggttttgattgaatgcagcattatcttttttggaggtactcagattccgatacttccaaagctattgaaatcatttgcgaaaatgccatttctatttcctccgtaccatgccaaacttgctgaacttctgttaatcatactaattgcaattggtacaaagccaaaaaaaaatcaagatattaatattacaaaatcaatccttttaccaatagtcgttggattactgatgatgtttggttcattggcatttatagatgatacatttagaaaagacatcccgcagtttactccctattttaatatctatcaggctgtttacgcattactttcattcgtaggtgttttaataacccttttaggtgctgacaacatcagcaagattatgaaaatcaagcttggtaaagaccgctggaacattgaagaagaatcattcgatcaaaacaaggaattaattacgaatgacttttcaatcaacatcccttacttattttattataacaaacggatgaatcacggatggattaatatcaatccattcagaggtacacttgtaataggaacgcccggtagtggtaaatcttttggaattattaatccggcgatcaggcaattgattggcaaaggattttgtctctgtatttatgattataaatttccagatttgggaaagatagcgtactatcattatcaattgaaaaggcaacatgacgagagctataagcacgagtttgcggtaattaatcttaatgaagttgaaagatcaaaaagagtcaatcctttaagaaaagaatatcccgctacattagcagaagctcaggaaatggcggaagcaatggtgtcttcacttcaaaaaggtggtgggtcaggaggtggaagtgatcagtttttcacccagtcagccatcaattttctagcatcatgcatcgcttttcttgcaaaatatgaagagggcagattttcgaccttaccgcatctgctttcatttatgaaccgtggttacgaggaaattttcaatactcttttcaccaatatagagctgcattctctattatcaacttttaaatcggcttttgataacagggctttcgaccagctggaaggacagatcggaacacttaagatatttctatccagattggcaacgaaggaaagtttctgggtattttcaggtgatgatgtcaaacttaaaatttctgacagaaaaaaccctacaatcattgtcttagcgtctgatcccaatacacaggatattaattctgcattatattctaccatattaaatagactattaaaacagattaattccaaaggcaatttaccaagcggaattattgccgacgagctgccgactatttatatacataagatagataatttaattgctactgcaagaagcaataaagtagctgtactccttggactgcaggaaattccccagttccgccaattttataaaaaagaagttgcagacacgattacagcaatcatcggaaatattctcagtggcagtgctcgagataaaagtacactggattggcttgaaaaagtatttggcaaagtaaaacaaaaaagccagtctatgtcaatcaataataatcaaacgaccatttcaattcaggaaaagatggataacctcattcctgccggtaaaatagcaggattaaaaacgggagaaatggtgggtattatcgcaggtgatgaaaataatcaaactgaagaatataaaacttcggccatacacggcagaatcaatcttgatatgaaaagtatcgaggatgaggaagctaactatattgaaatgcccgtgtattataactttaaagacaagtcaggaaaaaatgataaagagaaaatcctgatgtcgaactttctacgaatcaacagagaagtagagttgatcattaaggacttcaatccgtaactctaacaacataaaatttaaaaaaaatgaaaaaaacagtaatactgatgcatttgttaattttttcaaatttcctacctcaatttaatacggcttcctataaaggaaaactcaatactattcgattgaactcctctttacaaaatcaattcaccaccagctttttgtcttaccatattgcagggaagttgaataaaaaatattttgagaagagtaaagattcattgaataatgcagcaaatgaaactgagcaaacaactactccacaagccaattcaattaaaaaagatgatgatattcaagcgacgtcggaagacgattcattgtcagagaatcatccatccgaaaaaaaatacagaaataaaaaactttcattattagaatacgaaaaatacccaactgaagaactacagattatttatatgcctttagaaaaaatgaagatcacctcgaatttcgggcatcgctttcatcccatcgataaaattgaaaaatttcatgccggtgttgacctgcgggctaacagcgattatgtatttgcagtattggatggaatcattagtgatacaggttacagtaatggtgcaggaaattacatcaaagtacagcacggcgattttgagaccatatatctgcatctgcaaaaaacttttttttcattgggcgacttcgtctatgccggtgatattatcgctataagtggtaatagcgggaaaagcactgcaccgcatctgcatttttcagtgaaagaaagaggaaaatatatagatccggttcatttcttaaatgacttaataaaaacaaacaacgcaatttcagattacaattatggaaaatactagcaccttacttacagatgaacttagaaagttcggaatcatgaatcagcaggatcatttttccgagaaactctcaaaaaaagaaattgatgattttcttaaaggaggaattctcattgccgaaaatgataaaaacaggctcacttttaaaataaatgacgataagcttgatgtcaatgtttataataaagatatagtcaatcacaaagacctttcaactgccgaactttttgaaatttcttcaagcaatagaaatctttacaaagtgatggctgactatggaaacatcactcatattggaacagggtactttaataagaacccggaaaacgaaatgaccacatttgttgaaatagaaaacgaaaggggaaaaacaatctttttcggaaacaagcttgaagatagtcttaaagattttaaagttggagataaaattcagattattcagaccggtgttgaaaaaacggttcttaaaatagatgatgctgatgaaaaggaactcgcaaaatttgataatgtttttataataaacccgttcaaagaaaaaaataagcagttccagtccaggatttttgaattggataaaaaagacaatacgataaaagatgtggatacaacaaaatacgagctcaaaaatgttaacggtcacaatatctcagaaaaacagcttcagcaattacgaaaaggtaaagagcttaagttagatgatgaaaccaccatacagataagtccggcatcaaaaaatgaggctaaattgagcgcaagttcaaaatcactcctgatactatcccttgcgacggatggcggtcttagtttcttgatcataaaaggcattcagaagcttgctagaatgcaggaagaaaatcaactacaaaaagaaagtataagatatcaggtcgagcttcaaaaactaaaagcacacctgaaatcgaaatcagagcaatatcctgataataaaaatatcataactgaccttaatattgtcagcaaagaaatctctgcttctcaatcctctttaaatgaaaatactaataaggaaaaagaaaagagcaatattaatcttcaggttaacgatccagatatgtatcaagatgctaatcaaaagaaagaggaagagaaacgagatgcagaagaagcatcaaggtcaacatctcattccagaggacggtaataatgataattatcatgctcctaagcttagaaacgctaaagatatttcagggaaaaatcagtgaaaatggaaatctctactttttaggattcagaaagaatagctggactattatttacagagatggctcatcactagagacaaagtctttttaccagattataaatcattttggtgatttgatcatccataatatatactgtttcagatacattttggaagcaatgctttttttacaaaataaacattgtgattatctaaggaattcgctaattatcattaccgcgtcaaaaaataaaaaagaaataaaatcctttttatttagacgatacattcagaaaaatcttgtcgtaccaaagattcatttatttcattcactgcgaaattttgaattaactgtactctatcttgaacttttagataaaggagttgtctctgaaaccattcagctaaaaggtcaaaattatctaaagataaagtataaatcaattcagattatacttgatacagaacagcagacgaaaagtaaaattttgtttctgttaggtataaatgataagatctttaaaattcgcaattatgatctatcacatttaatgagtgatagaaatctctattggtaacctcacatccaaatatatagcaataatgaaaagcgatgacgcattaaaatcagaagttgagattatatctgaatactttagaaatacaaacaacagtatttggttaaaagaagggctccgtggttcaatctcaagtgaaattgacagctataactctcttatagaaaatcttcaaaacaagagaaaaatgttttccggaattgatctaactatttcaccttttaattcctcaggagcagacttcaaaataattataaaaaatgacagcgaaagactgcagctactctcgggattgctaaattttcgatccaagcaaataaatgatttagataacaaattacataacaatcataatattaacaacatggaaaataatgtatttcaatccaaaaaagccgatttagaagtaaaaatcgaactgcccaatcaagagaaaccgttttttgaaaaaatgtccactcctaataatttggttaatatgctgcaaaaagcggggcagaaattaaatccaaatgagacactacgcgttaatttgaacggtacttcattagtgctcaccaaagaacaaaccgagaagccagaaattcttcaaaacctggaaacagaatacaataaagttaacaggctaaaaaacgggcatcctgaagaaaatagaaatctacaagatttaaaagatcagatcaagtatttaggttttggcgaagaacaaaaagttcatacggaactggctgataatttagcttcagataaaaaagaatttatcatcaatatttcttcagataaagcatctttcaaaaacaatgaaatcaattttgagctgaaatttcaaaaatctgaaaaaaatgaaaacttctacttaaactctttccttgcaaatcttaagaacaatgagaaggatgtcaacttaaaccatacattttccgctaatggaaactttacggctaaagaagcgatcaatcttttagaaggcagatctgttaaaacggagatttataataaacatttggatgcaaaagaggatgcttttgtaaagctacaattgaatgaagaaaagaatgaaaaaggaaatttcaagcttcaggtttttaataaaaactacggaattgacattgaaaagatcattgataaagcaaaacttcattttgataacgataagcacagagaaattaccaccaaatcacttgaaaaaggcaatattgtttcggtaaaattttcagatctgaaaaataatatagtcgaaggaaaagcaattctcaacccccaatacaagatgctgaatctgtatgataataagatgaaaagattcaactctaatgagcaggcctttcaaaaggataattcggaaactaatgaggtaaagaatcagcagagccattcccgaaaaatttaatatctatgagagtttttgctttattattcttttgtttatttctagtttcttgtaataagggaaaaaaaattcaaagtaaaagaggtggaattgatatagtcacgaatatttattacagtgcttcaaaaggtcttgaagagcaccaacagatcattttgtccaaaatgaactaccaggataaggacttaatagaattagtccccaatattcaaattccagaaataattgacagtgtatattatatccgtgattcattatatttcagcattggaaatactttacagtcaaaatctttgatttttaaagatcaaaaatttgaaaatggtagaaatgtcaaaaataaaaggtacggagcaatgtggattgacttacctatatccaactatcagcaacggaaaaatctaaatgacactgtactttatggaaaaaaacactttaaaagattccaaattataagtagagagacctacagtattttctatctaaataaaaccgatactattctaccctattctcttaatccgcttgctgacaaggactatggaggacggcttgaaagaactgacagctatgataaaaaaagagatttattcacaacaatcgtattgctgcctaggaaacgatgggataaagaagctgcggatatttttgaatataatcatcaaacaaatattgattccaaataaaaaatcccaagccaaattgggaggtcactgaaaaaccttgcatcttacgacagcctatttatttaggatgaaaaataagagcttattacaagatttaaaaatccgtaataagctttttattttattgggaagttgtttttttgnnnnnnnnnnnnnnnnnnnnnnnnnnnnnnnnnnnnnnnnnnnnnnnnnnnnnnnnnnnnnnnnnnnnnnnnnnnnnnnnnnnnnnnnnnnnnnnnnnnncaatagattttcgtcaaaaagcatatctttgtttttcatgaggtgttttagtatttgttcaattctaaaatattaattttagacattaagcacctcatgtttttctccgaattcacgttataataaaaaatcgaaagatttcctttttcaggcgccacttcctagttacgtaaccggaggagcaaattattacggaggtattgatgccatgtactcgaacatcggctctatggtgaacagaggtattgatcttaatatttcttacgaaacaaaaggggaaaaattcaactggacatcaaatcttgttgtttccagatacagaaacaaattattgagtcttgcggacggtttgtctgatattaatactcaggtaaacctgaacggttatctgccaatggtggcaaccaatactttaatcggcgaaccggtaggcgttttctggggatataaaaccaatgacctttatcgtacggcagaccagcttaataatgcaccgactcaattcggaactgcaccgaaactgggagacgttcgttacgtggatgtaaatggagatggtaaaatcaatgagtctgatatgacgatcatcggaaatccgcacccagattttacattcggattcaccaatactttcagatataaaaatgtggatctttctgtttttgtacagggttctgtaggtaatgacattctgaatcttacgaaaagaaacggtacaatgaattcccagttatatcaaaatcaactggtgggtgcgcttgattactggacaccaaataatccgaatgccagtttgccaagaccggttgcagacaataacagtacgaatcttcttatttctgaccgttttgtggaaaaaggagattacctgagaatacagaatgtaactttaggatacaccgtttcccccacttttgcttctcagcttaaacttacaagattcagaatctatgtaagcgcacagaacctgtttacgattacaaaatacagcggatacgatcctgaaataggatcattcaaccaaaatgtcttactgacaggagttgacaacggaagatatccttctccccgaacatttaattttggagttaatttagatttttaattaattatttatgaaagctttacaatattttaaacatacaggtttagccgtttcatttttggggcttggccttctgtcttcttgcagcagagaatttacagaccgtccttccgaggactccatcagtctggagaattattatcagaacaacgaacaggtacagggagcaacagacggaatgtactacaaaacatggtttcagtttaataataagtttttctacgccatttcggaagtaggttccggaaatatgtataccaattcttcggacgtaaatgccatgcgtaatttttccatcaactcttccgatgcggaaatgttcaatggatggcagtcgttatgggcgaatgtagcacaggctaataatctcatcaataatttacagaaaagagccggtgcaggagtttctcaggcggtgatcaatcaggctttaggagaagcttattttatccgcgccacagcttacttttatttagtgagattatggggacccgttcctataattattgataatgaagctgttgcagctaatcctaaagtaaacaccaatttcacagacgatgtttacgagctgattcgcagagattattctaaagcgatagaattactgcctgccaaaataagaggcggagattattcttcgaatgcgaaggtttctaaaggttctgcgaaagcttttcttgcaaaagtatatttgtacaataaaaattatacaatggcaagacaacttgctgaagaggtgattaacagtggagaatttaaattattaggaggaacatcgcaatattctattacaagtaaatcttttggggatcttttcacatatcctaacaacaataatgaggaatcgatattcgcattacaatggaaaggtgatatcaactacggatctgccaataactgcaacacacaatttgggatcagcaacggaacgtattctacctccaatgcgtcttacggcggtgtttttgcaccttctcaggatattttaacgttatatgacaccaatgatgtaagaaaggcaaatacgattatgtttcccggatatacgtacacagatataaaagttaaaaacggacagaattttcagactggtttcactgttccgccagcagaccagatcggaggccagggtgcaggtgcagccattaaaaaatattgcatcggaattgtaaatggtaattccacaggtcctgtagacagttgggcaatgatgaacaacaatacctacattatgagatttgcagagcttctgctgattgatgccgaagcgattttagcaggtggaagttctacttcagacggcaatgccttgaaggtttataatgctgtaagaaacagagccggtctgtcgaatgttacttctttcacttttgatgatttgtttaaagaacgaagaagagagcttgctttcgaaggcgattactggtttgatctcggaaggattgaccgcagtaaagccattgcgattatgtctgctcaaaaccgtggaaatatgtttactgccgaatattttacaccttcatccagcagtttcactcttccttatcctgcaaatgatgttgctaaaaatccgaagcttttggatagcccggtacattatcaattttaaaatttacagaaaatgaaaaataaaatattttatacgaaattattagcctggctcattcctatcatgggtttgctttctgtacagtcctgtaacaacgaggaggatgatatgaaggggacaactcctgttatcgaactggtttctgcatcggtagatgccaacaacaagcctgtagatcctttggtaagcacccatatcggttatccgtctaatacttacgttattaaaggttccggttttgccagtctcagacatatctattttaatgattatgagtctacctttaatcctaatctggttacagacaatgcgatcattattaccatcaatatcaataccccttatgttaacggaagtaataaattaaaattagttaccgcaaacggaactgttgagtatgattttgtcattgctccaccgtctccgatttttaatggattccaaagcatcaacgctgccgacggaaccaatattactcttaaagggaactatttcgttaatccgacagtaaaagtaggcaatacggatgcagctattgtttcttacgatcttacccacattgttgcaactcttcccgcaggatcgcagggtaaaaaagtgtctgtaactactttatcaggagccgttacgtacaactctcagataggtacttctgtttatgatgatgctttctttggaggtatttctaatgctacatgggcaggagatacttatgatacggcatacaatacagatcccgcaaacgttaaacagggagaaaaagcaataaaatgggatgtaaaagcatggtctgcattccagatcgataacagtccatctataccttccactgcaaaaggaattcggttttatataaaatctacctctgcaataaatagtggattacgtcttattttaaattacggttggggaactactccatctataagtgtaggaacagaatatcaatattttgaaattccgtgggcgtctttcgggttatcttcagcaccttctacaatgaatgttgtatttaataataacaccggaaatacaaatacgatatacatggatgatatcggttattattactaaaccaagttgttattgctcttgcgagcataggatattttaacaatattttttttatacagtttatctttagacgtacatggtaaatcatgtacgtcttttttttcagccaaatttatttttataccgactttctttctgccatccagcctcaccatatgtgtctacaaagcatattttaacttgtgccattccttcagaaactaaagaaataacacaggtagcatcctgtttgttacgcgtgatataccaacgagcatcaccatgagccaaaccccatgagggaactctgctcactaataaatctgcctcttctctgctgtttacgactgcaacccttacctgtgcttctcctaatgaagctgtctgatatatccttgccatatttaaccgtttttttatgttttatgttatgtacgaaataaccttacgaaggtttcgcgtatttcattcttttaagtaattgggtagtgtgatagccgtcgagagaggaaccggcaactgttcctgccttttcaatatccaagattcctgtttcatcccagatttcttcagggaaatataagtctgtaatttcgccgacaattaagtgtgtaccgttgctttttacagaaacaatttctttcaggattaatcccatttgtatattcgactctttcacaaaaggtgctgaaaaattatttctgtattcagcagttagtccggaagcatcaaattctgactgttcgcgcttatatcttgccgatgtcttgtgtgctttttcaaaaatctctttattcacatgattaatggtgtaataacctgtctgctgtatattttccagcgtatgtctctcaacggaatccggtcgggaaataaaccccattaaaggaggattcgcgccaatgtgcattacagaattaaagacagccagattggtttgcccatccttatttgcggttccaattaaattaagacttttaaagccactcaaagaattaacaagtgccgttcttttcctttcttctgtttcggctatctgctgattggtaaaatggattaacattaagtattgtgatttaaatttttaattaaaatgtatttaaaacagaatttaattctgctgaggctgagtgatttttagagaaatgatattatgcttataaaactgtatgagaaagtctgtcaattacattatcaaattttaaagcataaatttcacagacaataattcattgtcacagtgcagttctctttttaaacatctgaaaaaagacattcacaaaaataactaccgctgtaataattgccgcaatataaacggtctggttggaatgctgattggctaccgcaatagcaattaatgcccagactgccaccaaagcaaaagctcccatcttctgtttccaaaccatatacaaatgaatgattgctgcaacggcaaacataatcaccgtccacacagtttctgaaattccaaagccggaccattggatttttttaagataagctgctacatcggcaattaaagccaccgaaatccagcccgaatagatataaaaaggcagacgaaggaaaattgttgtcttaagatctttagattctaaaatattacggttatttcctataattttaagcagagatatgaataaaaccaccataatcggaatcgtaagaaaagtatattcatacagccacgtaaatatccaaaggctgtttgcaacacaggaaacggtaaaccaccaaccgacatttaaaatagttttttctttggtatcagtatttttcgtaaacgggccgtaataaataacaaaccctaaaagcccaagatagatcagtccccaaatggaaaaggcatatcctgcaggagtaaacaggttctgatatctggctgaaatggtagccatcgtttcattattaaaaattccggtgttggaaagatagtttaccacaatggttgccaccaaagcaactgcatttaaaatctgaaatagctttgccataatttattttcagttaaattaatcaaatttacatcaagccgagaaattctgccaacaaaaaaagtatgaattttaaactctgtgaagatttgagctgaatcttgttttagcttagctgaacttttacgaaagaaaagaaaaataacagtcccagtttgaagttttacttttaagtctatttaaacttttatttaaccgcaaaagtcacaaaagatctactaaattttttatttaaagttgatcattataaatgaaaaagaactcaatagtttttaaaaatcttttatttttattcttttgagcgctttgattatcttggaaattcgctttaacatcatcttttgtcccttttgcggttaattctgaaattagcttaaacaagttttttgttttattttgggcttaatttttgacatcagttcgaaaagtgtatatgaaagcagactttttttggtagatttaattaaaatttaggttgaacattcttcgatcatattcgtatcgtaaacatcatatttcatgtattcagttcttgaaaaatttatccggagtaaaggcgaaatctcttctgaaaaaatagagatcattacttcctgttttcagccggtgaacacaaaacgaaacgaaatacttctccaatatgatgaggtatgcaaatggtactacttcatcaacaaaggatgcatccgtctgtttacaaccaccaaagacggaacagacagttcaagatattttgcttttgaaggaaattttgcaaccgctttgcccagttttatcgaccagaaaccagcacaggaatatctccagaccatagaaaaatcggagctgctccgcatttctaggaaagatttttattttctcgtagaaactgtacccgaatttgccaaaatctataccgaaattctggaactcggattcatcattgcccaaaagaggatttatggatttcagggttttgatgctttggaaagagtaaaatggctgatcgaatatcagccgcagcttttgcttcgggtatcgaacagaatggttgcttcttatctgggaatttctccttctaccttaagcagaataaaatcgaaactgtaaaaacgttgctctatgtcaacgtttttaatttttgagctgtctaactttgcaagacatcgaagtaatttaaaatatagaaaaatgaaatcattaatttttagcattcttttcgctcttttgtcgataggagcttctgcacagaaaaataattttcagctatccactcacattctggatgtttcaaaaggaattcctgctccgggagttaaaattaagctggaaaaatacaatgagcaatcgaaaatctggtcttttgtggatgagaaaagtacagatacaaatggcagaattccggattttcttccggcagaaaaagaaaatctcggcattttcaaattaacatattatacgaaagactatttcaaaaaagacaataccgaaagcttttatccttttgttgaggtcgtgtttgaaattaaggataaaaatcattaccatgttcccatcacgctttcgccttatggatattccacatacagaggaagttaaaacaaaacagtattttgaaaacaggcttcagcattaattttggctaaagcctttttacttcaattaattaaaattgacgaatgcccattcctgtttataatcctacactgaactcacgttaagatgcattcgtaatttgggctgtctatacagatattcatttgccagttgtacgccgccatctttcaaaccaatgaactgattttcttctgcgttatattcttttccgaaatgagcgttttcatgcttaagatagagatcaatatcagaaaatttccggtcggttatatacagacgcaaagtatcattaattgttgtaatgtaatgaaaatcgctgctttcattcagttcgatcaccagatgcggccagtttttcatggtctgtgaatgcagcagaattccgtaatacgatgcatgataatcaaatacatttttcaggactttattctgcataatgtaatcttcaaaatctgtcaggcgcaattgaggacccgcactgaaaattccgaataaaaaagcggtaatccacgaattatcaattttaaaatatttaatgctttcctccgtactcagatccggatgaggaagaaggtaataaacaggaaaatttctgaactgcattaatcctgtaatataattcagcagcaaatccggaacagcgggaggctgcgttactaaagcaggcagataactgtattggttttgttcctttagcagatgatgtatttccagatcgttcttccattttttcaattcctgaagaaccttattgtcattcataatcattaatctgccgagttgccatgccgcagaataggtcatgtcgtacatcttcgtatcttcattcaaaagattaagataatcctgatgatccggaacatccgtccatcccctttcctgtatccaaccataaagatcgaatgaataattccaattgataaaaggtccctgataccacgaaactattttccctcctgctttcagttgatgttccagcggaatttttgcaagatcaattaattttcttaccgcttcatgctccacattcatggtcattttaaaaggctgaagttgtaattcatacagataaccttttaagtttttaccgttgtatcttaaatattcaaggatgtaattattcttcccttttttcccgttttcagtttcttcaaaatcccggacggattttggttccggcagtttttcccattcttgtttacgagcttttaaataggcttcattctcggatattaaccgggcaagttcaggattggctgcttttttcaattcttccaaagttaaaacttccgagtcggctaagcctttctgaaacttattgaaatcaggatgttctttcagcttattgatattaatctgataaagatctgcactgatgctttcaaaagaccattctgctaaaacaacgcaggattttgtcttttcatattcatttgctccgctgaaattatttaactgatatttttctttttcctgattgtttacttcagcagaataataacagacgaatactttatatttggtatccggttctacccttctgtgagagattacaatggaagtttcttcaggaagattcagctttttcagttcttcatgttcctgaactcttacgtgcgcgagctgcgaaacaaaatccacagacggaaaaatttcgcggtttccttttaaaagattaagaatttttagtgttttgggttccgtaatgtcttccagtgaatcattaagatggttggtatcgctttccagtatttcaaaatctccggaagccagttcttcttctttcagcaaaaccaaaaaaatgtagggaattctgtttcctttatattgacattcaaattcccaaggcagagtacttctcctgaactgtatatgcggaaaagctcctgcaaaatcgcctgtatgttcattgggaggatacattgccagtatttcattctgaggaatagcggcgttgtaaccttctacatagaaaacaatctcctgttgctgaactgtggtgagattattctgaagatcagtcttaatctggtattttcctgatcctactgtggggatatgcgacggagcaatgcctgttttttcttctgccattttaagcgatttgataggttcctaaagattttcctttgtatttgtaaacttccgtggtattttccagatcggaatagtcgatttcctcttcatttaaaattcctaaaacagtcatcatgcttatatccggctgtgcagaattttgattgtattttgcttccggtgctgtaaaatcatcccgatagattttggcacaggtatcgtataaagatgtggtaacaggattaattccggattctgttttagaaaactccaaacggatgcctttgcatatctctttcagcaattttgaaccggataatatttcttcctgatccggaattgtatttgtgtgattccaaatggacttgggaagcgatttcagcaccggagaaaactgaaaggaggaaaagtgcgaaacggctcctgtaaccgataacccgagtttgctgtctaacggagtagaatctttgtaaacaggatagatattctccttttttacactttcggcagtcagttgatctccattgatttctgtaaccggaatttcggaaaaaatttctaacgcaaatgttttcggattaaccacaatagattctgttccgtcctttctctttattttttttataattcctgatgcaatattgcagaccagaatttttgcaggttcgggtaaaaagccggcaatgaattcttctctggttaatgcagtattaatagacttctgatggttgccgaatttaacttccagttcataacccgccactttaaaagtcgccaatcctctgaaatccggcccttccagttgtaatctggcactcagattaaatgtctgattgatgctaaaaagccatacatccaccactattttagcatagatctgaacatatacttctgctttgtaataaaatggcttccatgaaataatgaaatctgcactgaagagaagtcctatttctgcataaaccacgcgaccgttcaggataagattcaaacctcctgcaagacctgccataatgcagcttggtgttaaagcaaaataggctttaccgtaaaaattaactggtcccagattaaagctgaatcctaaacgcggtgtattattgggatagtgaaccggaactttaaaattgggatgataccctcccagagtaaatacgaagtctcctgcagcttctcctttcagccacatccctaaagcaaaaccgcctgttaatttcagttgaggcaacaatatatagttgttctccgttaattgtccctgtgcgagaaaggttccttcttccagatctgcgcgcatggaaaatgcgaattcaaaataataaactccttccagcttcatggtagataagcccaaaagatgtaaagaagttttattcccgaaagctactgcaagtattcctgtagtaaaaatcattttgtaggaatcaaatttaattcctgcaataattacataactgttttcgcgaacaggcaaataacggtttaaatcgccaaaaatctttttaatggaatctccctgttttaaacctccctgatgaacgattttaatgaggggaaaatccggaatctcggtaatctgaggcattataaaatctcggtttaatccaaatcccaaagcaaatccgtggatgtaaaaagcaggatctaaaggtatgggaatgcccaaatatccgaatgcgaataatgaagaatagtttggcgttttgatgtaagatccaatggctattatttcaattttacccaatctgaaggttaataaaccattgtattcttccgttccgtcgtgtatttctcttaaaaatgctcctgcgatagaaagtgaaggggtatcatagattatagcaagtccctgcaaagtaaactgaagctccttccataatttttccagactgaagttctgaaaaaccgtaaaaggaactttaattcccaagcctaccaactgcaaaccaaatggcccaacattgaaatctgctgataccgcaatctgtatgagatttttttcgatggagggttttatctcattaatttttaccaacggacgctgtttctctttttcctgctgagcatttcctgaagtcccggaattttgtttttttgcgggatctgaagccgggagcgcaggaacttttatgcctttaagatcaaaaccgggaaaggtaattttctgttcttcgtttcctgtttttaaaatcaatcctgcattgaatccggcgttgagaaacaatttatcattgtttatccagattttctgactgatgaaatttttctttgaaaggctgatcaatttctcccgatcaggcgttaatgaactttccttctgcgaaagatacacgagttcaagatctgaaattgcatattctttaagatactctcccaccaaaggcatttttgaaaaactgatggcttggttaatgcctactgaaaacagtttgaactctttagaaaatacacctttaagctttagatgtgagtattttgcttccagttgaaaagcggtaaggctttctgtatcgtctgagattttatagatcccgaaattaagtttttccggtacaaaaggaatgataatgtcttttacatcgccttcgtcttcgagaagtccggaaatattttttgaaacatccggcaactgaccaaccaaagaagttacggaaacgtcatcatccattttcgttctgtttcccgtaattttaaagtcaatcttttttattgagacatcaagctcaagctgaatatcagcttttgataatgatggtttttccatgatgtaaagctgtttgatggttttcgcggatcatattataaagattcagttttttcttaaaatcattatcttattttcatgatataagctaattttacgtgctgtggattcgggacttccaccggcgttggagtttcatgaccgatcgcaaattctgtggctatattttcgtctgtacaccaactgttttctctgtaaatagtctgatttctggaagtagctttcgttcctaaaaaatcaaaattatttccgcctgttccggcttctactttataatattttgtggtaacggtactccaaacccgcggaatatttttttcgcttagtgtaatggtattagacctgttgtaaacctgactgtttttctggccgattccggagttcccgagaataaagcttcctctaagatccggagtgttattaaagccgtcgcaaaaagcccagccttcgggaagcgtggttccgtaaaatgcaacgatggctcctaccggtaaagaaaccagttcgttattggtatataaagagttgttgacatcggttctgccggaagtgatcttcaccagttcttttgatcctttcataattttaagctcctcattaagtaattctatctggtttttcagcttaatgagatctgctgttaaagtactgatgactgtattctgagaatccaaagcattaatggttgcttttccggaagtaagcttttcaatgtctgcttcattcgctttaaagtctttgatgtttaaattttctgccatgattttaatgctttagagtgagtaaaaaattttgcctgttttgatgtggaatttcatctttccgtttctgtagccgggaatatttttgtactccagatagaaaggatatgttcctgatggattttcagcggaagagagtttggcttttaatccggacatttcaaaaacaatcgaggtacccattttcaacaggtattctttctgcaggtacaaaaaatcattgtctgtagatttggctttcgtaggaattgcagtaagagactgataatccagcaatttaacattgcttttctgctgtatatctttttcaaggatgcccagaaaattaccggcaaccctgaaacctgcactgtctgagagtttcagatcatgctctgaagtattgtttatgaccagtctgatggtttgtgcatcatttcctgagccgttgtataaagtatcatttccgagaataaatacttcaaaagggctttcgttttctcctcttatatccattatttcaaaaactttatcgatgatgagaggctgagattttgtataggttttagagaattcatctttggtaagtgttatattatacatttcaagctgcactaaaattctttcctgatctaagcggttcacaatggaaaggtcattcaatactgcggttaaatttgtattttcagtgttctgatttttaaagccaaaggaaatgtgcagatcgtctgattcttcggtattgtttgcttgtacagcagaatattgaaaaaagccttttttcactttaagttttgccgcgctgttatcctgtctttctatcgtcatctctcccggaagaagttcgaaggataaaggtttcggatcattttctataacgagtttatcaaaaacggaattgttgctgagagcaaagcttacagtatcaattaaagtggattttgagagtaaggtaaggtgttttccgatagatgtattaacgaggttttctatttcatctttggaaacatcatgatataccgacagatctgcaatgcgaagctgatctccgtctttattgcctcctacaatgatgttctgatcttctgcagcatcgttaaatgaaattacagcttttttcagcaccaagaaattatcgtccgtaagataaagctctatatttccggaagaattataataaacggaggcattaaaccagtggttttcccggattctgaagtcttcatcgtttattctgacgttacttttgaaagagacagcgtttctgttattagatttgatgacgctcagtattttatctccgatggtgatgagattaagagcctcgctgctgttttttttatgatagttaaaaaagaaattaattaaagttccttctttaccgatgctttttttaaaggttaattctaactgggttttatctttaaaattgagataagaacctttatactcatcaaaatcaacatttaaagcactattttgtaaaccggactgaacctgggttttgtaattattaacaatgtcgttattcactaaattatccagtggaaaataatataacagttttgccatgatgtttagaatttagtagattttatagacagccatccttcttttaaaacaagatggggaatgtttccggagttggtattaaagtccccgatctccagaatggctttggaggtattctcaatcagcttcagcaataatttttcatcgtcatcgggatcttcttttattttaatcttttcccattcttcgcggttaacaaaatggatctgatcttccggataaaagggatattcctgaatgatttttttattgatgaggctttgcttaaagcgttctctgatgattgctgaagcgttttctgtggtgaaaatgtacagtctgcccaacaattctctgagtgtgatgattttattggaggttttcattgacaggagttcagccagttctttttcggaatcgtttaattcagaattatttttttctttcagtgtttttgttttttcagtgtttaaataatagatttcttcgcccaacagattgttttcctgcttcatcacatatttttcccgaatgataaattctttgaggactgtatattttttatttttaaactgattaaaatctaaagcgatctgcatggatttaacgttttcgcttctgccgattttaccggttaacccatcgttaatgaattcatttcttatgctgtatttttctgtgttatttcgtatctgaaattcatttttatcaataaaatagatgtcttcctccggaaaaaacggcttcaattcattaattaaaatatgttcttcttttaattctgaaagcagtgtctgtaagtaggtttcggattcaaaattctgagaaaaatcgatggctaaattttgggtcatccgtttttttaagggtggatttgcaggagataaaggttgttttttattcttcttttccagttcgatccacgaccactgatagcgattatctttcgcaagggatagctgaaggttttctttgggcgttataacaggcgctgttaataacgtaagttcaattcttctcaaagcatttttaatggcattgtacggcagtcttatgcgcttttctggtaaaattcctgttttaatgttcaggtttcctttaggatgaatcagaagatatctttggcaggcattcagcgtatcattcagagccagaaagctttctttgtcctgatttttatagcttattgaagagctgtacatggttttaccttcaatttcgttccatttttctcttccgtcgattgggttttctttcagaaaatctttcagagaatagtaaaaacggcttattttcttttctgcatcattattaaaataaattttgctttccaaagctttcaaacccagtctttcgttctgttctttattttccagatggtagtgccagtaagccagaacgccgtcgttatactgatttaaatctccaatggacatcgggattttcactttatcatattttctctggctgttgtaggtattgatggtgatgttttctgaataactgatgtcatgcaatgcttctcctctggtgaataaattgatgttcactaaagtaatcgcaacaggcacggaagagatggtttccaacagagacggattggcataatcttcgggtgaaatatgctccattgttctctccagttcctttataaactgatcttttttgttggttttaccaattctttcaataatccagtgaataattcttctgagatgaggatttctaacaactgttgtatagtctgtgttttcctgagctaaaccggcatcaaaaggggaagattcccaagctccttctgtgtctattgcccctaaatgttttccgtgtgcatcaaaaaattctatccgctgattaagatacacaggaaccatccatccgagtacaggagatttttttccttcagttgctgttctggtaaatcttgtgcttacggcagaaggttgaagatatcttggcggcagtgcaacccagttatctttattttcgattttctgcacatgggtggtgattattttttccggctcgatgattctgtttcttccgaaagaatctacaattctcagtctgctcattttaaaggctccgtttctgaacggattgaatatggataatctgtttggcgttaaaagatcgagactgtttccatattctttacataaatcttctatgctttttgccatctctttatgatctgtaaatccattgggaatgaggggtaagacagacaagccattgcttctctgaagcattaaattattaaaatctgaaagggtaagttcaaacaaggaagtttcttccagtttctgaagaaatatttttattttttctattaattccgcgttgtctttttcatcaatacgaagaagatttttgcctaatttttcttttacatattctttaacctcatcgcttacaaaagaatgcccgtagtagatattaggattcggcatatacgcaatatcatgcaaaggataggcttttattaagtctgcattaagctcatccagaacataggagtcctgtaaaaaattttctgtaaaattagtatcggaagccagataatgaccttcttttttaggcagaaataaactttcccattctactttataggtatgccactgattggtcttgatttcctgagaattgaccacattcagcacattttgacggctttctttcttttccggattgaatactggtacagactgtatttcttccggagcagaaggattgctgaagagattgaaaatgctgttttttttcggagacgaaataataacgcttggcggcagcggttcgtaataatcggttctgttttttttggacagaatcattcttgttttataccgctgatgcaggaggttccggagttctttttcatttatggtttctccggtctgttttgctttcagtagaaatttaatgagggcataatcgcggtatcttgtgtaatgttctgatatttttccggaaaataaatcttttgcattcagagctttgtcttttgtatttctcagcttttcttttaagatgctgatctgtgaaattaacagtttcagatcttctttatgcttattgatgtttttatctttgcttaaaaataaagcatttaaatacgtagaccagtgcaggtacagactttcaattttagcctgtaatctgaaggtatccagctcatagctgttttgtattttgttgagattttccagctcatcttccaaaacttcggtataagaaatattgaggagatccggtaaagaaacgccttcccaaaccgcaagaatttcatcggattttgcagactcctgaaaggttttaagcttatcttttatcttttcatactgtaaagccacatttccgctgaactcaaaatccacaaggctgctgtctacatcatattcctgaacagcatcttcctgatcagaaataacaatattcagaacatattttgttgttccggatgttttattaaactgttgctcgtgctgtttattcctcagtctggaaatccagtccagattcagctccttcagttcatcaaaattaatgattgaagcaatctgttcttcctgtttctgaagatcctgcctggaaagatcagggttattggtattgatgattaatgcagaaagtgtctcgggcaaagtattggcaacagcaacatcaaaggattcttcattttctgtggcctccccggattttaactgaaaattacctgcaacgatatattcatcggctgcgttttgtccgtaatgatctacccatccgataacctgatatatttcgttttctgttccgtcttcatcataaaatccaaatacacttctgcagttgggataatggatatcgaatgaaaaacttccccatcccaaagcactgagattttttaaataattcgtctgggcattggtctgatagatccagtcgttcagtttatattttcttcccacatatgcaaactgaaaagtatctgttgcttcttccgcgtaggtacaggtattgtttttattcagtttaggatcgttaacgttccatatataatcgctttccacaatccattcctccccatcacgctgtctttttatataccaccgattgggagcttttggcagatttccttcatcattaaattttttaaagaatgaaggaagaataaaatgaagatgaactcccttatccagataaatggaattatcccatgaaaaaggtcttggaataatcgagtttgtttcgaggggaacattgggattttcaaagacatgacgctctgtattcatccacggaacattttcaaaacggatatcctgaccaataacctgttcaggcgaattgagatacaaagcatttatccggaaaggaagtatattgggcataattattttacagagtcttctaactgtttaaagatatcatccgtagatcccaaagtcatcattttcttcaccacgttgcggtctgtattccagatagaaaaattaactgaattgatggacatagtttcaaattctgcaaagaacgccttactatctatacttatggacagtgcatattcccattttgcttttttgtcatcctttagcttggttcccttttcatcgcattcttccattacaggtggttttcctggatctgcttctgtattaatataatatgcctttttatataaataagcagttttcagataaaaatgaatcttattgatgtcgaatttattatccgagctattctgttttagctgatctgtaacctgttttgtagcttcctcggaatcactcccaaatattttcttaaaatcactttttaaatcattgaaagttacaaaatcatccgatgaaacttttgtaggaacaagcagatattctttcgttgtaactttttttgtatcaaaatcttgttccgtactttgaacaactaaggctaaatctctttttaaaaaagtcagggatattcccaattgaaattgactcatgatataatttttttttaaaattcctactcgtgtggcttttcagaatacgccccgttttgtaatggtttctggtctccatgattattgttttattttcacacctgattgagaatcgggttatgtaaatttaataaaagaaagcactcggcatcattttccctatcataaatttctgatttttaaatcattaataaatagtcagagtttttcattcatcctctccgtcatttgtcgcgtttagtaaccaaaattataggaaaataatcctattcatttcagtagaaatactggtttttttatcaattaaagttttaaaatctacctaaaaaattacttgtaaataaaaatcacgtcgctttatgaagcgacgtgatggtatgaaatttataaatttctgagctctgttgtatttgaaagaattacatcaacctgtcaaaatgaatcggaagatcataaattctctttccggttgcatggaaaatcgcgtttgtaatggcaggaggcattcctactccaccgatttcgcctaccccttttacgcccaaatcatttacaaatgaatcattttcttccacaaataccacttccagatcatgtatatctgcatggacaggaatatgatattcacccagattggcattcatatattttcccaactcatgatcgagtatggtttcttcgtgcaaagctttgctgattccccagatcatgcctcccaaaacctgactttctgctgttttaggattgataattttccctgctgcaacggctgtaaccgctctttttacttcaataattcccaactcttcatccacttctacctcaacgaaaaccgcactgtgaacggctctggctttttttccgtattttaaaggattaggcattgcagaatttgtggttcggattgcttccccgccattttttttgaaaatttctttgacatccacctgtatttcaggctgatcttttacggtgataaaaccatttttgaatataacatctttaaaatttacattttttaaaacggaatctttcaaatctttagctctttcgaaaagttttttgtttaaagcctgacaggcattctgtactgcgggtcccaccgttgccgtagtaaacgatcctccctgaatcggagcaaacggcatcttactgtctgcatacgaaaacgtaacatcttccatggaaagtcccagttcatctgccgcaatctgcgtcatgatcgtcttcgttccggttccgatgtcggtcacggcactttttatttcaacttttccatccggtgtcataatcgcttccgcacgtcctaaaatccgattggcatcccaaattccggtagccattccgtaaccgaccagcttatttccgcgcttcatgcttcggggttcaggatttctcttattccagccaaatttttctgctccttccagataacattttctgagttctttactcgaatattccttatcactgcttttatcaatttctgaataattgataagccttaattccagcgggtctatatttaattgataagcaatttcatccatcgttacttccacagcgtgcattccggtacttccgcccggtgctctcatatcaagcgggctgtaaacgtctaacggcacaatttcatgttccaacaaggtattttctgcggggtacagcatatttgcccagttcaccacaatttcaacataatcttcaaaccgcgaagtttcaccggttgctttgtgataaattgcattgactttaccttctttatcggctccaaattttgtatgctgcaacgtcggaggtctgtgtccgatcatgtacatctgcgcacgatccaaagtgacacgaacattacgttttaaagccagcgaagccattaccgccataaaaagctgctgctgcggacgaagccccgaaccaaaaccaccgcctacaaacggtgagatgacctgtacatttttcattttaagcccgaaaacattcgcaacatacatttgggaattaatcgttccctgtgttttatcgtaaatagtgagtttatcttttccttcgtagatcacggtggatgcatacatttccataggattgtgatgctcggttccgtgactgaaaagactgtcggtcttaacaaacgaattttcatattcttttttgaaatcaccggtaggttttggcggaggcggtttcagcagcgaagccagtccttttttaggatctctggctttttcaagatttttcttcagatccgtttcaaaattttcgtcttcttcttcataaaccacttttatttttgctgccgcataacgagccatttcaaaggtttctgcaaccaccaaagcaatcggttgtccgttatatcggattatattatctttaagaggtttaaaaacagttccgggaggtgcatccatatcggcatactgaaaatcaaaccaggcagttgaaggtttattttcatgggtgaacacctcaataactccttctaatttttttatttctgatgtatcgatggtcttgattttaccttttgtaatcgaactgttcacaatgtacccatacaataagtccggagcatcatattctgctgcatattttgcttgacctgttactttcagatgaccttcaagacgatttattgattgtccgacagacggtgtatttttcataaaattttctttagcattcataataatttataaagaaggttttgcacccggtctctgagacaccggatcaagagccatcatacagtttctgacgattgcttttttggcgagattaattttaaaactgttatgttcaaaacctacggctccttccaaaataatgtcagccgcagccgcaaagttttccggatttgcttctttatctgttaaaaaatcttcagcttcttttacacgccacggtttgtgcgaaacacctcccaaagcaattcttgcttctttaattattccgttttccagttccagaccagtagcaacggaaactaatgcaaacgaataagaacttcggtctcttaatttcaggtaagaataattttttgaaaatcctttttcaggcagttcaattcctgtgatgacctctccttttttcaggttattatcgatctccggagtatcttccggaagtctgtgaaaatctgaaaatttcaatgtccgatctccatccgttcccgatatatgaacgactgtatccaaagctgccagagcaacacacatatccgaaggaaaaacagcaatacagttttcgctgtgtcctaaaattgcgtgaattcggttgtaccctttcatcgcagaacatccggagcccggaactcttttattgcagggagtattaatgtcgtaaaaataataacatcgggttcgctgtaataaatttccgccattggtcgccatatttctgatctgtgccgaagctcccgccaaaatagctttagaaagaagcggatatttttcttcaataattggatgatacgctgtatctgcattcgtcattaaagcaccaatacgaattcctccgttatcagattcagtaatatcagctattccgtcaatgagattaatatcgattaaagtgtctgcctcggtaacaaaatatttcatcagatcgatgatattggtacctccggcaatgattttattttcttcatttgcataagtcaatgaaactgcttcatcaacactattggcttttgtgtaggaaaaattattcataaagaccttgttttactgccattacagcgttaataattcctttgttggctccgcatcggcaaagatttccgctcatcagttcctgaatttcttcccgcgtatttgccttattttcgttcaacaatcctatggcgctgcagatttgtcccggagtacagtatccgcactggaaagcatcatgttcaataaaagctttctgaacgggatgcaggttttcaccatcggaaatcccttctatggttgtaatttcagcatcagctttcattacgcagagactgaggcagcttaatactcttttgccgtcaatcagaaccgtacatgcgccgcattgcccatgatcacagcctttttttgttccggtataatgcagattttctctcagagcatcaagaagtgatacccatggaagtacatccagatgatgttcctttccatttatttttaatgtaacagattgttttccagtgttcgccataaatcggtagtttggttatgggtagtgatacaaaaaaagaaccgttattatcgaaaatatcttttccgtggtatattaaagcctgaaattgatttaaatatattcaatctaaataaggaaaacagatcataaaaggataaaaaaatattctgtaccattcagatacagaatattgatatgattctaaaatagaaaacagcagtctatttgtgtgacaatgccattaaaattttatcgggagtaatcggcaaatctctcattcgtataccaatggcattataaattgcattggctatcgcaggtgctgtcccgataattccaacttcgccgagacctttcgcgccggaaggattaatattaggatcaggtttatgaataaaatccacctcaacaatcggcgcatctgcattcacagcaaaatgatatcctgccaaatcattaccgattaatgttcctaattttgcatcgatctgattttcttccatcagtgtcattccgattccgccaaccgccgctcctgacatctgattggctgctgcctgactgttgatgatttttcctccatctgctacgacagcaagcttgtcaattttgacttttccggttcgtttattaactcggactttgcaaaaatgagccgctgaagagcagaacgcaaatttttcccgctcacttcccggttttgaagctacttcaagacgaatttcagtcagattattcttttcaaacagttcttcataagaaacagaaacagttgaattattttttaaactgatgcttttatccgaaagaagaatattttccagagcagctcctttaaagcttccattaactgatgatgcatattccgccagtttttgcttcaactgattgcttgcgtcatacaccgcaccacttacggaagacagtcctgtacttccaccctgacttggcgcaggaggaagcgcagaatttcccaattctatattgattttattttttgaaattccggtaatttcgtgggcaatgttctgcattccggttcctgttcccgtcccgatgtctgtcatcgcggtctgtacaatgagacttccgtctttgctcatgataattgctgctttggcttctgctcttcctgcattccacattccgactgccattccgtagccgatgtaccagtcgccttcaattaccattgcgggcgttgcttttctggcattccatccgatcattttagaacctttgtttatacattcatccagaaaatgggtagaccacggcaaatttgaatcaggatgattttgcagtgaaatattttttaacctcaacgctacaggatccattttcaactggtaggacagttcatcaatggcagactccaaagcgaatactccggtacagtctcccggaccgcgcatccacgttggtgtgcttaaatttaacggaacatttgctgcttccgtttttaaattgggaaacttgtaaattaatcttgtaacccgtgtaattccgtcgttaaaattttcatagactgaagtttcgttctttgcctgatgtaaaattcctgaaagatttcccgacggatctgatgccaattttattctctgccatgaagccggtctgtatcccgttgccgcaaacatctgcggtcttgtaagcatcagttttaccggacgtccggtttgttttgccgccattaccgaagctaaaacgtgtggccagattctgagtccggagccgaaaccgcctcctacaaattcactgaatacctgtatatttttttcaggaatggaaaataaccttgcaaatgttctctgaacattatttactccttggtttttatcgtaaagcttcaacgtatcattgcctgtccaatgagcaatcgtggcgtgcatttccatgggattatgcacatctgccttaatattatattgctgatctaccgtgaatggtaaattttgccaactgtcaaaatttcctctttcttttccttcagcttttaaagcaactgtttctttcgcagaatcaaaatcaaccgcaaaactgtctttctgatattctgtttctaccaatgacgcggcaaaagttgcgtcttccagtgtttctgcaatcaccatcgcaacaggctgtcctttgaaaaatattttatccgtatgaaaaatcggcaaaccgaatctcgactgtttaattttttcttcagtatccatacccggaaccgaaggtttgtgcagatgggtaatgatatcaataacgccttccacttctttagctttatcaaccaaaatcgactgtatttttccggaaggaactgtactgttcaccaatacggcgtagcacatattcttaacctcgtattcggcagcgtatttaccgcttccggtaactttttctactccttcaacacgtccttcgggtcttttggatctgatgttcagtaattcgagtaatcccataattgttactttttaatatatcccaaccttattgattcacacaattttgtaatgctgttacaatagctccctgaagcatcggtatcttatagccgttctcagacaagggtttcagatctttggttgccagtttagcagcttcctcaaagatttctaccgtagctttttttccgttcagaaatttttctgcctccaaccatctccagggtttatgcgccacacctcctgaagctaagcgggcatcttttattcttttcccgtccagatccagtgctgctgcaaccgaaaccaacgcaaaagcgtatgaagtcctgtctcttacttttacataagcagaatgtttcccgaaagcattatcaggaatttctatattggttattatggcatcctgtggtaaagtattatctagccaaggtgtattttccggcagtttatgaaagtctttaaatggtattttaatttctttctgatcttttgtctgagcggtaactgtggcatccaatgcagccagagccacacaaaaatccgacggatgaaccgcaacacactgattattatatccagcaacggcactcattcggttggcaccatcaattgcactgcaaccgctgttgggttttcttttattgcatggcgttgtaacatcgtaaaaataaggacatctggttcgctgcaacagatttcccgctgaacttgccatatttctaatctgtggtgaagccccagctaaaatagcttttgaaatgagaggaaatttttccgtcacttctttgttgtttgctactttactgttactcgccattgcgccaatctgcaaactgttattctgatgatttactgcatcggataatgccgtggtaacatcaatcagcttctccggctgggcaatgtttttcttcatcagatctaccagattcgttccgcctgcaatatactgactgactgctgatttcatggtggaagcttcagcagcagattttactttttcaaaattaaatggtctcattgggctgcaactttttggatggactgaacaataccgttatacgctccgcaacggcaaagattaccgctcatatattctttaatctcttctacagaacctgtatgaccttcattaacgcaggcaacagcagacataatctgtcccggcgtgcaatatccgcactggaaaccgtcacattctataaatgccttctgcatcggatgaagctcatctccgtttgccagaccttcgatggttgtgatctcttttccctgagccattgccgccaaagtaaggcaactcagggctctttccccattgatgtggatggtacaggcgccacattgtccgtggtcacagccttttttagatccggtaagattaagctgttccctgaaaaggtctaaaagtgtggttcgggtatccacataaagggtatgactttttttattgatggaaagcgtaagtctggatacgtttttcttgggaacaagatactgtttcacatcctgataaaatgcttttaccgaagacggaatagccataaaaccagccagtaatcctgaaactttgaggaagctcctcctgctgtattgtccttttaattccataagttattttttaatcaatataaatgatacggataggttttaacaaatatcatcaattaaaataagaaattgatgatatacattacagttttatataccaatattacagtttttgagtgtaacccgaaaaaaaacagataatatttatgtaaatttgaatatataataactttttaatgattttatctcaacaaaaatcatacataagttgaaaaaacaagaagtaatccataaaaatgttttcggatgaaagagatcaatgatattgtaaaagcatataaaaaggcacatttaaatgggttaaaggctgctttggcaacggtggtaaaggtagaaggttcttcatacagacaagcaggggcgagaatgttggttacagaagacggacagcttacaggcgccatcagtggaggatgtttagagggtgatgctttgagaaaagcattactcgccattcatcagaaaaacaataagctcattacgtatgatacaagtaatccggatgatctggaatttggcgttcagttgggatgtaacggaatcgtacatattctttttgaatatattaatgaaaattttcctcaaaatcccatctcccttttagagaaaacaacggaaaaaagagatgaatctgttattatcacaatattctcactggaaaaaagaaataaacagaccggaactgtcggattgataaaaaaggaaaatacaataatatcggactcaggttgtatttcagaaagtgaactgaatcgtttttcttcagaagttttagagaaaaaacaaaatatactcactcagatttcgtcgaatgaaatcctgctgcaatatgttccaccacagaccacgctgattattgcaggagcgggaaacgatgttaaacctttggtagaaacggcttccattttaggatggaaaacagtaatcgcagacggaagagcaacacacgccctgaaaaagagatttcctagtgcggatgaagtattgctcgcaacgcctgaagaaatcataaaaacaatagaagttgatgaagcaacggttttcgtgatgatgacgcacaattataattatgatgtcgctctgctgaggctcattatacatcaaccggtacaatatataggattactgggtcctaaaacaaggttcaacagaatgatggatgatcttaaaaattcaggaactacggtcggagaaaaagaattaaataaactttttggtccggttggaatagatattggtgcagagacttcggaagaaattgccatttccgtaattgcagagatcaaagcggtcttaagcggaaaaaaaggttcctcattaagggataaaccagaaaaaatgcatactgatattctcagtatataaggaaattatgataacagatcaattcggaagaacccataattatcttcggatatctttaacggacaattgcaacctgcgctgcttttactgtatgccggaagaaaattatgattttacaccgcattctaaactgatgcaggcggatgaaattgataccatcgcaaaaatattcgttgagcacggcgttactaagatcagacttaccggaggtgagccgttcgtgagaaaagatgcttcaaagattgtcagaaatctgggaaaacttcctgtacaattgacgtgtactaccaacggaatccgaattgatgatatgcttcccgaaattattcagtcggattttcagagcatcaacatcagccttgatactttacagaaggaaaaattcctgaaaattacccgacgcgattattttgaccgcgtcctaagaaatattaatcttttactgcagcataacatcaaaaccaagatcaatgttgttgccatgaaagatattaatgataatgaaatttcagattttatcgcttttacaaaagatcatcctgtagaagtgcggtttatcgagtttatgcctttcagcggaaacagatggagcagcaatcaggtcatgacacaaaaagacattctgaatattatcagggaaaaatatgattttaatccgcttcctgtcggttttcatgacacggcaaagccgtacagcattgatggacatcaaggaagtttttccattataagcacgatgagcgaaccgttttgcagcggatgtaacagaatccggcttaccgcagacggaaaattaaagaactgtctgttttcaaaaaaagaaaccgatcttctcacacctttacgaaacggtgaagatattttacctattatagaatctgccatctggtcgaaagcaaaaacgcagggcggacaattgaatgaacaatttgaaaaaataaacacatcaatcattcagaacagaagtatgatcaatattggcggatgatgaaaaatacaggaattatattactggcagccggaaattcttccagaatgggatctccgaaacagcttttggtgtatcagggaaaaacatttttagaaaaaataactgatactgctttagaagtatttgatccgaatcaaatcgttttggttctcggagcccgtcatcatgaaatatcttctgtcattaaaaataaaaatatacacatcgttatcaatgaaaactgggaatcaggaatggcttcctcaatacagacaggaatgaaaacactgtccggtctgtttccggaaatggaaagatgtttcatttcggtatgcgatcagccttatcttaccagtaatttattttcaaaaatgcttcagttgcagaaaacttcaggaaaggaaattgttgttacaaaatatgccgatacattgggcgttcctgctttattttctaaaaaatattttaaaccattaatggaacttaccggtgaacagggcgctaaaaagatcattcaacagaatatgagcgatgtggaatcttttgagtttgaaaaaggtgctgttgacattgatactccgtcagattataatcatttaaaaacccagccatgataagcgtagaagaagcaaaaaaaataatcgaacaaaatattccggaaagaaaaacccggattcttcctttgaaagaagccttcggacacactaccgcagaagatatttattcaatatataacatcccgaatttttcacagtcctcaatggatggctacgcgatccgttttgaagataaagatctaaagctgaaaatttcaggcgaaatgcaggcgggatctacagagcagtttcatctcgaaaaagggaatgcctgccgtatttttacgggtgccccacttcccatcggtgcagataccatcgttatgcaggaaaaagctttgactgaaaacggatatctcacggttcatgataacgacctcgaaaaagggctgcacatacgaaatgccggaagcgatgcgaaaaaagacagtgtggcaatacgttcaggaagttatctttcggctgctgccatcggatatcttgccggaatcggatgtacggaaatcaacgtttttgctcctccatcggtttcgttaattcttacgggcaacgaacttgtacaacccggagaaaatttagcttttggtcaggtttacgaatccaattcctatcagttggaaagtgttttaaaacagtgtggaattactaccattaaaagtttttgggtaaaagatgatccttcagaagttgaaaaaacgctgcatctggcgatttccaaaacagatattgtgattttggtcggcggtgtaagtgtcggcgattacgattttgtaattgatgccactaaacaatgcggcgttgagcagaaatttcataaaatccgccagaaacccggaaaacctttctatttcgggacgaagggagaaaaacttgttttcggattacccggaaatccgtcatcggcattaacgtgtttttatttatatattgcgccattgctttcagaaatgatgaaacgtccggtgattacggaaagaaccaatgcaacttccacttcttcgtatggaaagaaaacaggtcttacccatttcctgaaagcaacctatgaaaacggaaaagtaacgccgcttcatgcgcaggaatcgtatcgtctccagtcttttgcagaagccaattgtctgatgattttacctgaagattcggaaggttgtaaaaaagatgaagaggtcgaaattatagtgttaaagtaaagatcaaataatgaatgtagaatttttttatctgattttatttatcattgcagctttatatgcagcagtcggacacggcggtgcaagcggttatctggcgttaatggctttgtacggaatagctcccaaagaaatgaaaccgaccgctttggtgcttaatcttttcgtttcgcttacttcttttatacaatattataggggaggacattttaaactcaggatctttattccgattgctttagcgtctattcctttggctttcgtgggtggaatgattcatattgaagacactttgtacaaaagaatcttaggtattttattgctatttcctgttttccgttttttcttttttaaaagtccggatgatagtgagctgaaagatccccaaatctatttatctttacttttcggaggagttattggtttactgtccggaatgattggcattgggggaggaattttgttatctccggtgctgattttactgaaatggaccaaccagaaacagaccgcggcaatcagtgcagctttcatttttgttaattcagtggcaggtttaggaggaatgttcaccaaagagatttcttttaccagcgatatgtggatgtacatcatctgtgcgtttgcaggaggattgcttggtgcttatctcgcttcaaaaaaactgaaccaaaacggtctgaaatatgtacttgctgttgtacttttaatggcttcctacaaattaatatcaagcactatttaaatatcattaaatgaaaaatttaattttacttcttacagtttgctgcgcttccgttgcttttgcccaatctgcaaaaagcattgagattatctctcccgataaccaaaaaacaattgtaacatccgccgaacttttgaaatatccacaacatacaatagacagcatacagattaccaaccatttaaaggaatacaaatctacccttaaagatataaaaggggttttgctgaaagatgttctttcaaaaatttcatttaaagaaaaatcaccaaaagttttaagcgaatactacattacctgcattgcagaagacggctataaagttgttttttcgtggaacgaaatttttaacacgactgttggtgataatattttaataattccggaaaccgaaaacagaccaaaggatggcatttctaccgtgtcttctactgattttgcgaccggaagacgatatgtaaaaatgctgaaaaccattcagctaaaaaaagtaaatgaatgagtactgtaaaaataataagcttcggcagactgaaagagattttaggtccggattttgaagcggaagcggaaaataccgatgagctgatcaataagctgaatgaaaaatttccccagttgaaagatttaaaactgagaattgcggtgaatcagaaaattatttcagagaatacagctttacaaaataacgatgtggcagctttaatgccaccttattcaggagggtaaattatgttgaattcagaacgctacgacagacagattaaattacagggtttcggcatcgaatctcaggataaacttgcttcagcgaaagttttggtgattggagccggcggtttgggctgtcctgttctccaatatctcaccgcagccggagtcggcaatatcggtattgtagatgatgaccgtgtttcgctgagcaatctgcaccggcagattctttacaattctgatgacgttggaaaacttaaaaccgaagctgctttagaaaggctgaatgcgatgaatcccgaagtacattataagattttttccgagcggattattccccaaaatgcagtaaatattgtttctgaatatgatatcataatagactgtaccgacaatttcgcaacacgttacttgcttgatgatgtatgccggattttagaaaaacctcttattttcggggcaatttatcagtacgaaggtcagattgccatttttaatgtcagaaataaagaaggttttacaacgcattatcgaaatctattccccgaacctccaaatccgggagaagttcctgactgtaacgaggcgggagttttgggcgttttacccggagttatcggaactttacaggcgactgaagccattaaattaatgacaggaatcggagaaccgctgatcaatcaattaatgacaatcgatattctgagttatcagactgctgtttttgaaattccttcgttaaatttaaccgataaaaatattccttacagtattgaagaatttgagaacatgaactatcagcttcactgcggaattgaatttgccggaattaaaaatatttctccttcagaatttaaagaagccacaaaactccccgaaacagttgttattgatgttcgcgaaccggaagaacaaccaaaactggatgttcagtatatttcgattccattatctcagctaaaggaaaatgtaagccaaatcaataacagaaatgtcattgtggtctgtcaatccggtaagagaagcctgtccggagcgaaaattttacaggaaattttaggaccagaatacagcatcagtcacctggaaggcggaatcaatcatttaaataaagaaactcatgagtaagattaaaaatatatttcaaaacagtcctgtttcacctttattcatcgcggaaagcattaccaaacattcctcgaaaacagaaattggagcccatcagatttttctgggacagatccgcgcagatgaaattgacggtaaaacggtaaaagccatagaatatacagcttacgaagatttagccctctctcaaatggcagttatcagagaagaaatttttgcaaaatataatttgacctgtatgcatattcatcacagtttgggaatcgtgaatgcaggagaaatatgcctttttgtgtttacctcatcaaaacaccgcaaagaagtaactttagcctgtaacgaagtggtggaacgtataaaaaacgaactcccgatctggggcagagaaatttttgaggatgaaacgcatcaatggaaaacaaaccaataaaccatggtagatattacttttaaaacctttacgctgcgaaaagcgattgcagcggcaacgataaaaacctcagcaatttcaacggtagaagctgtaaaaaacggaacggttccgaaaggaaatgtgctcgaatttgcaagagcttccgctttactggcgattaaaaaaacgagcgatgttattccggactgtcatcctttgcctgtggaatttgccgcgattaattatgaaatgagtggtttggatattaacatcaccgttgaagttcataccatttataagaccggcgttgaagttgaagccatgcatggagcttctgttgctgctttggttatttacgacatgcttaaaccgattgataaaaatgtagagattgccaatatccggcttttggaaaagcagggcggaaaaagcagtcagaaaaatattgaaacggaaaatcttactgccgcagtagttgtctgcagtgactctgtttctcagggacttaaagatgatacttccggaaaacttttggtggaatctcttaacaatcacggaatcagcaatgttgattattcagtggttcctgatgatgtttctgccattcaggaaaaaatagaattctttaaaaatagaggctgtcatcttcttgtttttacaggcggaacgggtctttcggatcgtgatgtaacgccggaagcggttttaccattcattaccaaagaaattccgggaattatggaaaccgcaagaaattatggacaggatcgtgtgaaaacatccatgctttccagaggaatcgccggattttctgatgatatgctgattttaacgtttccgggatcttccggtgcggtaaaagaatatgttcaggcactgtttccgcaggttttacatgtattttccgtaaaaaagggagacggacattcatgatgttgagtttcatttctatgtagctaaaagtaaatagttaaaaaactccatggagttttatctgtgtagacaccatattcggaagatgtttagcgttccgtaggaacgctatctttaggatatttatcgtattatagatatcaatcctacggattgattgatggatgtattcttatttctacacagattctgctcctaaaggagcaattattttactttaaacaaccctatgtaatagttacaaatgaaatttaattctaacttaagttcaatattaaaaagattaaaaattaattgatagtcaaaatgttgtattttatcaattatattaggcttcggctcgatgaaagattccaaattaaaattaaccatccaaaatcaagtatgagttttggctaaagccaattttcaatcttactcattaaaatgggctaaagcccattcctattgatatttgcgttgttctttcaagctcatgcaaattatctatttctcaggagaagaactgttttctccattttttccacagcggtttcaatctccgaaagagtggtatattttcctatgctgaatcgtactgaagccagtgcatcccgatcactcattcccattgcctgaagcacgtgagaaggttttgtggtaacggcattgcaggcagaaccgcttgaaacgcagatatttcctagggaaagaataagatcttcagaataaataccttcaaaacagatattggtggtattgaaaatccttgcggaatgatctccattgatgcttgtctgaggaattttaagcagttcatgttcaagatgatctcttagcattttaattttttgagcatcctgttccatctccataagtgtgatctcagctgcttttcccaacccgataattcccggaacatttaaagtaccgcttctgaggttattctgttgtcctcccccctgaatttgcggctgtattttatttttaatcgcggaagcaatataaagtgcgcctattcctttgggtccgtaaaatttatgggcggaaaaagccatcagatcaatattcaattcctttacgttcacaggtatttttccaacagcctgtgttgcatcacagaaaacacagcagccttttcgatgcgccatttctgcgatttcctttatgggatggatgactcctgtctcgttattcaccaacatgatacagaccatcaacgttttttcggtgatcaatgattccagatcagcaagactgatatttcccaagtaatctacattgagataatcgacctgaaatccatctttttcgagttgcgaacaggtatctaaaacggctttatgctctgtggtcactgtgataatatggcttttaccggtatctgttttaaatccttttaaagcaagatttacagattccgtcgctccggatgtgaaaataatttccttagtatctgcgccaatgagttccgctacttcttcagatgcattttcaacggcttcttttacagtaagtccaaaaagatgagaacttcctgaatttgcatagaagtcattgaagtaaggcaacatagcatccactacccttttatcaaccggagttgttgcattgtaatctaaataaacgaaatcattacccatcataccattttataatcagtataaaaatagcgaactttttcaggttagttttaaatttaatccagaagtttgtgtatcgccgaatatttgtagggtttaaagcaatctttttgccgaaaaacattcattatatttgcagtatgctttccaagaatgattttccaaaattaaacggactcgtccttgccggaggaaaaagtctgaggatgggaaatcctaaagacaaaatcaactggcacggcaaagaacagcggtatcatgcgacagatattttagctccattctgtgatgaagtatttatttcctgcagacaggatcagcttgaaaattttaacagcgattataaagcgcttcccgatacttttcaaaatatgggacctttcggcgggctgctttcggcgtttcattttcagcaagataaagcatggctggttattgcctgtgatcttcctcttgtagaccaaagttcaatagattttctcctacagttcagaaatccggaaaaagcggcaacagcctatgaaagtccttctgacggattaccggaaccattaattgccatctgggaacccaaaagctatcctttgcttcttcagttgctttcaacaggaaactcttcattaagaaaggctttgattaacagtgatgtaaaaatactgaaagctgaaaatccggattttttaatgaatgtaaatacgcacgaagatttggaaaaagcaaaagaaattttgagaatttagtttcatatccaattatttttactccaaacttgttccggatgcggcaataatatgctcatcgatctttttaaaaatatccggattgtgttttctgattttgattcggacatatttggaagcgggcatattggcgccattcactacattattgatagataccaacacattggtttccgggaaataggtcatggtgcttttctgcggaataggatattttaccacaataaaaagcggtgcaattctttctataccatcatcataattgaaaagatctacatgatctccttctttcagaccagctttttcaatgtctttttcgttcatcatcaccactctcctttcattgaaaattccacggtagcggtcatctaaaccataaaccactgtattgaactggtcgtgtgttctggtggttcccatcagatattcatcatcggcaagcgaattatcgggtacggatgttatattgaaggctgctttttccggatagaattcactgttgaaaactccgtctctcgctgaattcggaagataaaaaccggctttctgcactactctttcgttataattttcaaatcccggaatgcattgctccacatcatcacgaatggcatcataactgttgatgaatttatcccaatccactacggaacgttctcctaaaaccgcttttgccattctacaggcaacgtgggtttcattgatcagatgttctgaaatcgggtccagaattcctttggaagcctgtatcacgcccattgaattttcggtacttatatgttgaatttctccgtttacaatatctttttcacttcttgaaatcaccggtaagatcagcgcttctttgccatgaatcaggtgatttctgttcagttttacagaaaccatcaccgacatttcgagattgcgcattgcttctgctgtaaagctggtatcgggagctgcggaaaggaaattccctcccatacagaacatgaattttacttttccttcatgcatcgccttcagcgattttaccacatcatagcctccttttcggggtactttaaaaccataatattcctccagtctgtccaactgttctttggtgggatgatggttgataagcaatgttctgtttccctgtacattgctgtgaccgcgaacagggcaagctccgccgccttgaatgccgatgcttcctttcattagtaaaaggttcacaatattgtagatcatttccacaccgttgtgctgctgcgtaattcccattccccaacaaataatcatgcgtttttttgaagcgatcatttgcgctgcttctttcagactttcaacagaaattccgcattgttcagataaaaaattgaggtcatatcgttttaattcttcagtcagtgcttcgaaacctgctgttttgtttgctataaaatcctgatccaatacttttccgggattttttgcttcttcttccagtacaaggatctgaagggcttttaagagcgccatatctccgttgatcttgacaggaagatacagatctgacaattcaaaaggcttattgagtaaggcacgaacgttctgaggatctttaaatcctttcagacctgcttccggaagcggattgatgcctataatttttgctccgtttttctttccttttgtgagggcagaaagcattctcggtgaattggttcccggattctgtccgataatcatgatgagatcggtatcataaaagtcttccagttttacggttccttttccgataccaatgcttctggaaagtgcgtatcctgaagtttcatggcacatattggaacaatcggggaagttgttggttccgaattcacgcgcaaacaactgatatacccaggttgcttcattgctggttcttccggaggtgtaaaatatagcttcatcgggagaatccagagcatttaatttttctgaaatttttgtaaaagcatcgtcccagcttatcggctgataatgtgttgctccttcaggaagatacatcggttctgcaattcttcccaattgactgatttcaaaatccgtcattttggccaaatcgtataccgaattctctttaaaaaattctgctccgattttttttgaagtggcttcttccgccaaagcttttgctccgttttcgcagtattctcccagtttggaacgttcgtcatccggatcgggccatgcacagcttggacagtcgaatccgtcaaactgattcatgctgaaaagtgctcttcctccacgaagaactgaagcattgagaaccaactgttccagtgaatgaatcactgcgggaactcctgctgcccaatttttcgggggctttacctttagatttcccagtgtataaggagattctgctgaaggaaatctgctgttgtcttcttttttattgaattcatttttactttccatgacttctacatttaaaaaatgaaagaattaacattttatattcggattgggataattgtcgctttgatcttccaatgtattatcgatgcagacaaaatctttttctactaaaattttcaccagaccggattgtccgtcaaatcctaccctgtcggtggaaatccattcagcgatcatggtttcaggcatttttaaaaccatggtattatcgatgaaagccgatgagagttctgcgtcttctgttttttcaatagaatagatgaaaggacggtctataaattgtgtagtgcttgaaatttttccgttttttccgagttctgctacttcagactgagtgaggcggaatcttacggagttgtcttttattcttattttcataatagattttcaattttaaaatggcttccggaatggtagatattaaaccggttgtttcgcaaaaagcctaataaagtaatatcaaattctttggcaaggtctactgccagacttgaaggcgctcctattgcagcaacagttgcaattcctgccattgcggctttctgaataagttcaaagctggctcttccgctcagaaccaaaattttattgtccagtggaagaagattggcagacagcgcatatcctatcagtttatctaaagcgttatgtcttcccacatcttcacgtatggcaagaaggtttccttgtaaatcaaataaacctgaagcgtgtatgcctcctgttgcactgaaattattctggaaagaatgtagtttttcggataattgatagatcgtatccagagagacttctgtgttttgtcttttttgatctttaaaaatgctcactgtttttatagattctatggatccttttccacaaactccgcaactggaagttgtatagaagtttctttcagttttcataaggtcgggaacaaaacctttatttaattctaccatgacaatatttccgctgtttctggaacattcttcctttggagaataaatggctttaacctgtttattactggttataattccttctgtaaataaaaaaccaaccgccagttcttcatcatttccgggggttctcatggaaaccgatatatttttagattcttttttatctgctgaataataggaaactcttatttctaacggttcttctacagagacatcatctgtgtaatgaaaactgatgttgtccttaactttaacgatttctatctgctttaccgatttatctgataacagatgggctttcataatataatggtaattggtaaataaaggtacaaattttattcctgaaataaccttcagacgaaaattcaattgcttttaaagtttttaaaatacaatacttcaaacctcaacattatattctgaattcagcaaaacaaaaatgacaacatctctatgaatgctgtcattgtctttattttctgaattgttttcgcggatatttttatttccagtctccgtggaaagccaacatctgttctgctgtagcctgaaaatgtccttctgtgaatgaatcctgcaaacgcatcagacttcctttctgtgcagcaaaaaatacggtctttttatcagttatgattttaaagagcgattcatattttccgtctctcagataaatgtatccgaattctacagtcgtgtaatctaatttttcaaaatcttctccctgctccagctcgcctaccgcggtattcgcaagggtttcttttacttcattcatctgttcagcggagattttttctgctttttccatatttatttttttaagtttgtgtttaaactcattaaaaacttaactaaaaacctgtttaaactaatttttaatgaaaatactaaaatttctttttaaacgaaaaaataaaacctcgcatacgcaaggtttattttatatgtaattgtaagaaatttatgcatgtcctgttgcgaggtacgacatcagccagcctgcacagccgatcgccaatctcaagattagttttttaaatattgttttggacatggattttccctgttcaagatattcgtctgttctttcattggctgttcctactttttttgacaatttggttcccgccaccgcactgagagaaaacacgtaaagaattgcagcccacgcagcacttgcgaatcctatgaacatcaaaatagttcctataattcctaatgtatccattgtactagttttttgaaagttttttgagatacagttgataactcatgaatgcaaaagctgctgaacctgccaaacctaaaaacccgatcaaagccattgttttcggattgattcctgaatatttcccagcctctatatccggagcaataatccacatcgcaagcgataaaacaatcaccagtaaacagacagctcttacagcattttttttcataaaggcaataacaatcatgacaaatgccaaaacggttactgcaatacctaaaattccggcagtatctaccttccatttcgggggtactttttccagaatctcaaggctttcttttacctgaggatcatctatttttgtaatatcgattccctgttttttcagatcatcaatctgttgctgggctttatctgcaatactgtagtcatcgcttccaattctgctctcgatatttttaaatagtaagccggaacaagtaccgcctaccaaaaatgcaagaaccataaatattaaagttaatactctcataaactgtttaaattaaatatgttattcgattttttttaattattcaactacttctatactggtaattttaccgttttgccaatgtgttgtcgctgttccactgcttcccaatatattttgaatacggaagacatatgtttttccgtcctctgtaaaataagaaagttctgctttgttgctcatgatattacttgccataatatatccatcctgtgttgcaatggaatgaacattttttccttcttcaacataaggcgcaaaaccttccagaagaccaatgggtttttctgtggtataagcatctataattccgtatactgcgtcaggaatagaagatttatctttaattacagcagggtttatcacagtatattctgtatcagcaggggtattgattacgattttatcaattactgtattttcatctacaagaaaataggcatcttcaaatcctgtatctatatcatgaccgaaatacataatatcatcggctgctttaatctctttatctttgctgaatactttcaggaaaatcatttcatccttcggatttttaacctccagataaatatattttttcccttttggggcaattttaatcattttctccttctcagagcgcaaaactttcatttcttcaaacttcagaatggtaatgggattgttttctattttaaattctttgcctatttctatttttgtaggttcctgtccgcaggaatttaaaagtaatgcagccgaaagaatcggaatcaaaaaaaatgatctttttttcatggtttgtttagttaaattataaaattattcttctttttttgaatattttattttttttaaattcaaaatgcaataataaacgaaagcaaaatagcaattccgacaaatgaacatttgtaaggtttaccggtaaattcgtaaggtttacgagcaaatctgtactcagttttacacatgaagatgatccagcaatgccagaaattcctctttctttctcaccgaaagtggtatggctgcgttatttttcatcattaccgtattaccgccatcggattttacataatgatcaaaataagacatattaataagatgggactgatgggttctgaagaaattaaaaggagttaaaatattttcatattcttttaaattggtagaaacaactaatttcggtgcgttgataaaatgaaacgtggtataattcttctcggactggcaattgacaatatcctgaatattaaccgagtaaattttatctgttgtcttcaatctaagtttctgaatatttttaggacgttcaggattagaaaacaaataactgaatttgatgtcgaaaagttctttccttactgattcttcggctttttttactgcttctatcaaatcctctgttttcaatggcttcaagagataatcaactgctgaaaaacggaatgcttttacggcagaattctcacagtctgttataaatatgagtttgaatgtattgggacttaaattttcgagcagatcaaaactgcttccgtcagaaaaaagggtatccagaaaaacgatatcgggagaaaactgctctataacttttataccggattctacagaatgcgcctctcctactaaagtaagattcgggcagttattttttatcagagtacagtgttttttccttacctccggattatcatcaatgacgatgacttttagcatgattattaattttcacaaatatagaatatttccaatttctcacaataaaaacgtaaataatccggaagtgctttaaaagggcatgtttattgtaaagtatgaaggacaccaaataaaaaatttaatatgaacaacgaaaaaaatgtagccgtactaaacgatttactgaacattaccaatgacagaattgaaggattttcaaaagtggaagacaaagtatgggacactcattctgcgttaagaagtgattatgaccagatggtttctgaatcgcaaactatgaaaaatgatttgataagacacattaatgaacacggaggcaaggcagataataccacaagtacagcaggagctttccacagagcatggattgatgtaaaaaacgctttttcagcagataaggatgagtctactctggaaaatgtggtttttggagagaaagcagccatcgatgcttatcaggatgctttggacagcggagatcttgctccggaatgttcaagattggtttcggatcagcttcatcatctgaaatcttcttattcaaaatttgaaaatcttgaagcaagaaattagtaaaataaattattaccatcccactaaagagagtttttcagctctctttttgtgattatataaaacagttacccatgaataatatcgacagtattgcccttatcggaggcggaccggctgctctgtttgttgtgaaacatcttatggcagaaaaaatttatccaaaagaactttacatcttcgaaaaaagtgaaaatcttggatccggaatgccttacagccattatggagctaattttgagcacgttgccaatgtttccgccaatgagcttccggaattaccacaatcttttacagattttgtaacgaaaaaggatttaaaagattatcctgattttgccaacaaagccggcgaaagcatcaacgaatatcaagtgattcccagactgcttttaggaaattatctcgaagatcagtttcatcatctgctgaaaactgccggtaagcataatgttactataaaagtttttaaaaatacaaaagttgtagatattgacaggaagaatgatgatttttttaatgtaattacagaatccggtgatataaataaggtttctaaggtaattatctgcacgggacatcaatggtcttcggaaaatgaaatccgcagcaaaggatggtatgattctccttatcctccttctaaattcaatattgcatccaatcattcggttgccattcgagggacatctcttaccgcggtagatgcggtgaaaactctggcaaggctgaacggaaaatacgttgaagaaaatggcggtctgaagtatcttattaatgaagaaaacaaaaacttttctattactttattttcgaaaagaggatttcttccagctttaaggtttcattcggaaggaagtccgtattctgaaggatggatcatgtctcatgacgaaatctatgaatataaacagaaaaataacggttttgtggatctggattatgtatttaatctgaattttaaagaacctctcagaaagaagaatgaaggtttttatcaggaaataaaagaccttacgattgaagagtttgttaataaaatgcttgaattgagagaaagactggatagttttcagcttttcagggcagagtttgccgaggcggaaaaatcgatagaaagacatcagaccattgcgtggaaagaaactttgtctgcattcagctatgcgattaattatcctgcgaaacatttttcggcagaggatatgatgaggctcagaaagactcttcttcctcttatttccgttattattgcttctcttccgcagtcttcgtacaaagaacttattgctctttatgatgcaggaattttgcatctggtgagtgtaaatgaaaacagccgtatcgaatctcatgaggaagaaggaattatttatcattatacggatgaagcgggagcagaaaaatcagatcactataaactgtatattgatgccatcagtcagcaaccggtacaattcaatgatattccttttgaaggtctgaaaaacggaagattaatcagttcgggctatattaaatttaaagatccggaaaaaggtaaaagtgaatttgaaagggacagcaatcatatcatgaaaacagagccggacaattattatcttcgggtagacggactgaatatcaatgatcattttcaggcactggattattacggaaaagcaacagaggatctttacattatggctgttccgtatattgcaggattaaatcccgactattccggactggatttttgtgatacggcaggaaaaagaattgtacagtctttagtataaataaaaccataaattatgcattcgtcaaaactctgtaaaccggacgaatgcattttttctgaattcttaaagatggataaacaatttagaattgtttttctgttcagtttattattatcctgctttttgataaggaatggtaaaccaaaaggtacttccctctcccaacttactttcaacgcctatttttcccgaatgttttttaacgatttctgagcagatatataacccgagaccaagtccggaataggatttactcatgtattcaacacgataataccggtcaaaaagatgaggaataacagattctgatattccgcttccaaaatcgcgcacggaaattttaatgtctttttccaaacgttctatcgaaatatggatttcttctgattctttagcgtatttaacggcgttgttcacaaggtttaccacaacctgctcaattctgtgttcatcggcatatatttccagattttcatcaccctgtacaataagtttgtatttattttccagccttacatggctgcagctcttgctcagcatttcataaagattaaaatatccgtattccagcatcagttgatcctgtcccagtctgctcatattcaataggtcgtcaatcagcatatgcatcttgccgatttctttatccgactgctctataaggcggttatgaatttcagagaaaggacggtcttttatcctgttcagcaactgtatggaagcctttacagcagttaacggagttttgagttcatggctcgctacgcttaaaaaatcatctttgcgctgttctgcatgttttttttctgtgatgtcggaagtcattcccaccattctgtccgctactccattttcattgtatcttggtcttccgtgcgcctgaatccagtggatagagccatctttccattttacgggatattcagctttataaattccgttggttctgatggcttcctgtaccagactttttatttttggtctgtattccggaagcattgcttcaaatagatcggtataattgaattcttcttccggcataaatccgaaattatatttaaactgatcgttacactgcatttttccggtagtaagatctacttctgtagaacccagcttgcttgcatccagagcaatttcaagccttttctttatttcaataagcgagtgtctggattgtacctgttcggttacatcacttgccaccacaagaacagaaatgcttttgttgttttcatcgaaaatcggctgataggcaaaattgagataaagttcgttaagtactccgtttttttcgatcagaaccctgttttctttgccaaaataaggttctcccttctcatgcacttccgtgagaatatcaataaaagattgccccatcagttccggaagagcatccttcaacggcataccaataatagaacgatctttattccagatattcaatactttatcattcacaatatccacttcaaagttctttccttttaaagatgcgatcgcaaccggtgctttttctacgagcgttttaaatcttttttcattttccgttaaagtataattagctgttaaaagttcttttcttgcctgtaaaagattgctgttaacacggaaaagttcttcatgcttggcattgagatcttcgtttgtagcaagatattcttcattaagcgcagaaagatcgtctataagtttttgctcggatttagatttttcttctaccattcttaatgcttcctgccgttctgtaacttcaaaagcggtatgaagaatatactcggtttttccggatgcatctaaaattgctttatattcgaaatcgaaatagtaggttttaagagttccgtctatattaagaatcgcaggataatcttttgcaataaaggtttctccggatctccatacattctgcagcatatcaaaaaaaggctgtcctattaattcgggaactgcatccagaatattttttccaacaacacttctgtctttcccccagaaattaatcatggcttcattggcacttaatatttttatatcgtcaccctgatatactgccgttgcattgggtgaatagaataacacagacagtaatttttcaggttcgatattctgaggagaattcataattcaatttaaataatcaaatataattattaaaaactactaaaaaaaccggaatataaagttttatgaatttaataatcgcttttatccggatctgctcataaaatcgaaggtaaaaacaatctgatgctgcctatattttatcttgatgtgagtgaatacatcaacaggaatggagcattagccaaaatttatgccgattttctactaaataactctgattatcttacatttagaagaattacggattaaaaacagatatgcttccatacaaaaagcggctgcaaaaattttgcagcctgcttcctaaccaaataatatgaagatctatttacttttctgaagtatcaggttttattagaaatacacaacttccggctactacaaacagcactcctgcgagaataattgccgaggaaggattatttcctaaaaagttattgaatacaaaaccaaaggataatgtctgtatgagcatcggaattacaatcatcatattaatcacccccatgtaaattcctcttttgctgtgaggaatggatggtgaaaccatagaatatggcagtcccatcatcgaagcccacccgattcccaatgcaaccatcggaagtaagataaagtattcatttttaataaaaggtaaggtcataatgcctaaacctgtgaggaacaaacaaaatatataggtgtttttagaaccgaattttttagcaaaaggtacaagaagcaaagcagaaagcatcgtcacgatattataagaaccgttcattaatccggtctgtcctaccgcaacctcaacctgatgcagaattccttttgccaagcttaagtcggaggatacaacagaaattccttttttagcactttctatcaatgcattggctttagtttcatcagcttcagagattccgtacagcgaagacttcagcatcggcgtgatgaactgccaatagacaaaaagtgcgtaccactggaaaagataaaccagtgcgagttgccagagaactttcggcatttcttttattgcgacaataatttctataaaaggtgtaaaaaatgtacttttttcctttgcgattcttaattcttcaatttcttcttccgttggcgggatttcgggtgttttatacacagaccacgccacagatgcgattgaacagaacgatcccagaaagaaggaataataaacccaaacaggaattcctccgcttgcagaatttccgcctaaatatttctgaaaaacaaataacgatagattggcaagggtaatccccgctcccacaaaaagactctgcatctgaaaaccaaatgtctgctgatcttccggaagtttgtctccgataaaagcgcggtaaggttccattgcggtattgtttgcggcatccagaatccataaaagtcccgctgccatccagatggtagaactgaaaggaaataaaaacaaagctatactgcagaataatgctcccaacaaaaagaacggttttctgcgcccccattttggactccatgttttgtcgctgatggctccgattaaaggctggatcagtaacccggtaatgggacctgccagattgaggatgggaagctgttctgcatgcgctcccaaaaacgaatagatgggattaaccgcagtctgctgaagcccgaaactgtactgaatcccgaaaaatccgacattcatattccagatttgccagaaactcaggcgcggaatgattctttttgcgttcataaatctgtgtttacaagttcatagttttttccgagaataagatctgcattatttttgaaaccgcggataatatgatgttcaatttccaaaactttttctacaaagtcactttgctcgtcacgattgcgtttcatccggttttcgtgagtgtctctgtaattgcggtctatgaaaattttaaaatcaaattcttcaatttcgagaatgtaggttccttccacaatgatgacttcgtaccctgaagtgccgactttttcactgctgatcagattctcgctgtagtaaaccaaaggcttttcaatctccgcagattctgttttaaaatcttttatattctgagataatttttcaagatctacttcctgaattcctacattgtccagagattttaaccgattctcgtggttggttttcggaggaagtttaaaataatcgtccatctgtaaaaccagacttttcacattctcctgctctagaattttctttagggcaaaagcagttaccgattttccgcttccgctttctcctgcaatcccgatcgcaattttctgctttccattcaggggaaagttttttttcaataatgctgttatttctttggctgtagccagatgtttttcttttaattctataacgtcgccgaccattttttacttttttaagatgaaaaatttgaaaaactgtactttaataagtcattaaaagatatcccgatgccgaaaagcaaagctgatctgttcccaatggcaatagctgatctgtggaatagtattctctgaaatgctctcctttttcattcatcagttcttcgtactgcttcaggattttttcaggaatatcttttatgcctttctgtttaagtccgagacaaagccagcctaaaaatatcggccaagaacctccgttatggaaatgatagggttcgtttttgaagctgtagctgtagttgttttccagcagtcgccaatcgtcatctccggggaaaatcacaggataaaaagcaggaagcatccaatgtctgaattcctcttttactccatttaaaaattctgaaaaagcgtttgtatccagatcaaaatccagtaaaagagcgagtgcatttcctgcaagatcaaaacgtccgtcatatccgtttgcattcagcgaagcgtagaaatagggttttgcggtaactttcgcataagccgtttcgtgatatttagctgaatctggagcatttttatttttataaaaattttcctgaatcagattttttgtattttccgctacagtttttaatgtttcatcatcataaacttcagcagcattttttaaagcccaatatctcagaacgttatcgtacaaagtatatccggaagttacatattcatctgcccagtttccgcccaacggactgtacaccaaacctctctgattgtattcccagcttttaagacaggaaagggctttgtaaattttttctttcagactgtttttaagttcctgattttgcgtttttgtaagatattcgcaggttgtaacgatccaccagattgtggcatcggttcttcctacgtgcgttccgtagcttgctttatcattcaccacattggaagggatctgtccgttttccgcctgatgtttagcgagtgtaagaacagatttttccagtccggcaagaatttcatcatcatgtactaaaattccggcatatcccgtcatcatagaatccctcgcccatactcttgcgtagttgtctctttgttgcgcagatgccagaattccttcttctgtaatggctttccttataatttcaatggcttcctgtctaaacatattgtatttttttgaaaaaaatgcggaatgaactttcattcattccacatttagaggtaaaagtattaaaagtcaaattttacacttgcgctgtagctgcttcccggaagcgttcttgctcttacgattccgtttcctcctgcgatagatccttcttcagcttctgtaactgcaatggtgttgaagatgttgtttgcatttacgctaaccgaaagatttttcatcagttggtaagaaatataagggtttacaatcgcataaccaggcataattaatttgtttgaatcctgcgtgtaagcttttgttgctccgattaaatagaaaccaacattcagtttatctacgctgaagttagggtttacggagtacatgaatttaggtgttcttctaggcgtgtttccaacgatggtaggatccagtgcgtttttaatttccgcgtgggtataagtaagtcctgcttttatgtcaaaaccttttgtaattctgtaatacccatccaattctaccccaagagactgatatttgttttctgtttttctctgtgtagtcgcttcgtaattcgcttccttggttcctgcatagaaaagcgttgtattaaggaaatatcctgctcctcttaatttgtaaccggcttccacctgatttactttgtttacttttacagcatccaatgccggatcgtcattattggtatagttgtatcctgagaataaaattctgtctgcggaagcacttccaccctggctcactcttgcaaatacggcgtttttactgtttaaagcataattagcacctactgaatatccgaaaattccgtatctgtagtttacaggaacattgatgttgtcgttagaacctaccaattgttcaggaatatcaattactccgtttccgttcatatcgcgacttgtataggtaacggttcctccagagaaagttcctgttacttttcctatatcatatcttgcacccgcatcgatggttaatttatcggttgcgttgatttcgatctgtgcgtgaggcgcagtaatgtcatatttcgtattgtagtttctttttaaatttccccagtctttcattccatagttaagtaaaccctgatctgtgatgaaagctcctgaaaggtttttaacatctaccaatcttgcattgctgtcgcttacttcctgaatgtagttgttccacatccagtccatattgatgttttgggtagctttatacaatcctgcgttgaattttacattgctccattttttgctgatgttaaaatcgttcacaaaattattgaagttgttaagctttacattgaaaagtgcaattttcatgtaataagcattcatgtcaaccggagtattggttcctgaatacaccgcacttccgaaattggtaaagttagccgccgtaaagaaatcgcttcctttgcttacacttgcagggaacggtgcgataaactgtccgttgtttgctgaataacggattttttcttcaaatttccatccttctccaaggtcataattgaattctgcaccgatggtttttgaaatggaatgcattccgtctgaaacatcgctgttgaagatattaccatcgttccctaatgttctgtcgtgctgtaaattaattgtctgtaacgcaccgttcaggatgttataattggataaagaagaccatttcggatctgcatctgttccagaaaccgcaaccggcatcggcatatacgcagcagttctgtcatccagaaatttagcataaactctgaagcttcctttctcgaactttttcagtaatgaaactctgaactgtcctccgttattggaattgaatcctgtttttcttggtccgtccccgattctgtagaaacctcccaaagctaaaaacgtgttatctgcgatctgcgttccgtagtcgaaatctgttctgtagtttttatagtttaatcctaactgttgtgtgatgcttccgccttctttttctccggttttcgtgatgaagttgatgatccccgccggagaattgcttgcaaaaacagaggcagaacctcctcttaatgcttccactctggaaacaaaagaatcgaatcttgtaaactgatcctgtgttccgaatgcgatatctccgaactgcattaccggtaaaccgtcttcctgaatcaatagatatctggaacctcctgctgaaacaggaacccctcttaccgtaatattggagtttccttccccacctgaagattctgaacggattcccggaatggtacggaaaatttcggcagttgttcttggagcagcattttctatatctttcatttttaaggtagaaatagaagtactggttttaatagaagctttagggttggagttacctgtgataactacctcatcgattgctttacctcttgtaattgtatcattttctgtactctgagaaaacataaaggctgctgtattcatcgcgccgaaaatgagcaatctggtaaaaatttttgattccataatttttaagagtttttaattatggtctaaaagtattttttttaacatattcaaaatgtagtttttggtttgtgttaaatttatattaatttcaaacgtttgcgcaaacgtttgcggtggataacttctaaaaattttaactttttattaacattttaaaacaaaatattaacattttttaacttaaatttaacctcgaaacatcactaaattaacccaaaaattgcctcaattaacttaaaaatgaaaagagtcactataaaagacctcgcagaaatgctcaatatcagtgtatctacagtatccagagcgcttaaagatcaccccgatatcagcaatgccgtaaagcaaagagtaaaggaggctgcagaaacttttaattatattccgaatgattttgcgatcaacttcaggaaaaagtcttcaaaagttatcgggctcatcattccggaaatgtcgatgttttttattccttctattataagaggaatttcttcggtgctgcataaggaagggtatcatttttttgtattgtcctcagaagaatctgtgggaatggaggaagaaaacatcattacctgcatcaactcgcgtgtggacggaattcttatttctcttacaagacaaacaaaagatctttctcacctgaacagaataaaggagatagaagttcctgtagtaatgtttgacaaaacgatttctcagaattcttttgaacagattatttttgataataaactgaatgtggaaactgccgctgaaaagcttgccaataataagtgcaaaaaaattcttgccatttttggggatgaaaatctggacatcactcaaactagaagggattttttcctgcaaaagctgaaagaatatccgcaaatggaatgtaaggttattttttgtgagtctgcagaaagcgtaaaggaaaagctgaacattattctggactatgaacagtttgacggttactttgcgatgagtgacgaaacgcttgccggacttcacagttctcttatcaaaaagaaggtacagacttcggatgtaaaagtaattgcgataaccgaaggcacacttccgaaatatcttgatgaatcttatgaatgcatcatcaacgacgggttcagtatgggaacgatggcggcttccaagctgttgcagcttattaaaaataacaggtaatcgcggataacaggattttcatagattattttgctacatttgcctcataataaaatacacttcatgaaaaaaataacgcttttactctcagattttctctgctttaagagaaacaattcaatttattttttatcaactattttactaataaattatttaaagcatactttttaaatacatccaagtatttgatttacaaaacattacaataagataaactttattttaagaattatcaaatacttaataaaataaaactaacttctgtaaatatttaaaattcagccatttaatataattcactctataaagaataaattttatctattgaatgccttcaaaaaaattaaaaaaaattgttacatttgtttttgagggagtagatgatactttttcgcgttttattggttaatttagaataccataatatatagcattaaaaatcaacccatgagaaaaataattctactatttgtatgtatgttcggtatttcagtttcctcacagatcaaggtgttgaaaaacgaaactctgatagaaattggtaaagataatgccgtaggtttatataaaaaagatgataaatttactttcaattatcaggatctgaacaccgccaaccttaatactttcagatcattttcttttcagaatcttaataaagacgtttccggactttatgaaattattgaaaacggatttatcgacattcctgtaggaaatatcattctggaacttccgaatgatattatcgaactgcattttgaaaaaaactacggtactcctactgttcagtttatccagtatatcaacaaaaacagaaaattcgtaggaaaatcgcagcttcttacaaaaaaacagattgataagattttcggtaaaaccaacggaaaatctgcattgtatgaaaagccgggacaaaagaataatgttcagccgacgaatgcttccaatccgcaacctgctgcagttcagcctaccgcagaaacttcaggcaagaagtccaaaaaataatcaaactttttaaaatattgcatcaactcattcatccggatgagtttttttattttatttttgcaaaaagatcattacgaaattatgtctcttcaaataaacaatttaaccaaaaaatttggtgagcagactgctctgaacaacattaacgtttccattgacagaaatgaaatcatcggtcttttgggtccgaacggagccggaaaatcgactttaatgaaatctattgtcggcgcactgaaaattgatgaaggagaaataatttttaacggaaaaaacatcacggaaaacgaaatcgaaagcaaaaagaagatcggttttcttcctgaaaacaatccgctgtatctggaaatgtatgtgaaagaatatttacagtttgttgccaatattcataaaattccggcatcaagagtagatgaagtgattgaactcgtaggaattacgcatgaaaaatctaaaaaaatcggtcagctttccaaaggatacaaacagagagtaggtcttgcacaggcaattattcatcagccggatcttttaattctggatgaacctacgaacggactggatccgaaccaaatcatcgagatccgaaatgtggtgaaagaaatcggacagcaaaaaacggttttgctttccacacatatcatgcaggaagtggaagcgctttgctcgcgcgtgatccttattcataaaggaaatattctgcaggactgcccgattgatgagttcaaaggcaagttcgaaagtcttgaagaagcatttgcaaactataccgcataaaaagaaaaagctccaaaatctggagctttcctcttttgcaccgaagattttggcaaaagatatatagaatggttaaaagtttttaaagtgggcagaaaaattttctgtactttgaatatatatgatgttgtgtttttttgattcttacattcagctaaaatatttaagaattgttatcgcttttttcttcaattacattagccgtttctaagtttttcttttgaacctgctccaaaagctgcaatcccaaaagtccgctgattcctccgtttgctgaatctccgtttccgccgatcaacacttcaggcataattcttacgttttggctggcaatattttccatgatctttaactgggtgaaattatttccgcccattgcttccacagataatttgtaagattctgcgttggatttaccgatcgctaagattttttccgcttcagcattacccgttaatgaaatctgttctgcacttgcttttgccagtaattcgattttttcggcttcggcttttgcgagaagtcttgttttttcggcttcaccagttgccagaagtttcagtctgtctccttccgcagttgcctgtaatcttacggaattggcgtctccggttgcttttttcacggatgcatcagcgattctttctgcaatcacaacaccctgatccgcttttacaatttccttctgcatatctgcaacagcagtttctttttccagagcctgtctggtttcctgagcaagcatttcggtttcgtaggtgattttctgttcttctgccaactttctgtctgttaaagttttcatcagactttcaggaggaacgatagctccaattaacgtatccactgcatttacattatattgttccaaaacgctgctgatgtgatctttggctgactgctgtctttctttacgggttcctaaaaaggcaattacatcgctgtcctgcgcagagtttctgaagtagttcccgatcgttggttccaaaacctgacttacaagattgatcatatttccgaaacgggcaattacttttggcgcttcatatgtcggaatatgaataatctgcgaaacatccaagttgaaagggaaaccgtctttacttcgaactgtaatggtggaaagatttttatcgagttgatgggattcgcttctttcgtaagcccagtttaagacaagattggtagtcggaacaagttccactttcataatataagggttaatgggatattttccgggaccgatgggttctgcccaaactcctttatgacctttttctacaatatttccgtgtttaaagtctacgccgcttaaatcctgtccttcctctcctacataactgataatgactcctacatgaccgatcggaatttccgtcatttttaccatttcaacttttgtaaaccaagggtttaagaaatatgaacccgccaaaatcacctgttcctgaagtcctttgtaaccaccgctgtttaaaaaagtatcaacatcttgaaatttattatgaccgttgatgatctttccggcaatctgtccttcttccaaagggcttccttccatggttgttataattcccactgcattatccggaatctgagtcatgtctgtgagttcaatttcaaacagtaaagtattgattctgtatgatccgggagcaatgatggcggtttgacgaccttttcgtcctccgttttttaagaatgcttcggcatcctgaaaagaatcgcagtctacttttcttcctaaaattcttccggtttccagctccatcccgtctttcgcaagaagtaagcctatttttcctgtgggaattacggtgaagggctgaaaatcaatagaatattgccagatccattttccgaaataaactccgggagccaacgtctgtgcctgaaaaccggcttctccgttggtggcaatgattcttccttcgggaagttcctgcttaccaaccaacacgaattttttggtaaccaagcctattctgtcctgcggaacaatgactaatccgaagaaaattcttagaataaatttgtaaaaaataacgcacaatagtgcaataacgaccggaatcatccagccatgaaaacttaattccatagtttgtttgtttttttgtttgattaaatttgaaaacaggaattgcgctctattttttcataaaaagaaaaacagagtacgaattatatgataattctttcgaataatttaagaaagtgcaggaggtgaagtattgaaaatcgtgaaagtgatttctgatacttttaaaaggaaaaacttaaagttaattagtttcattttgataagaaaggaacgagatccttttgatgatacaaatgtaagaaagaaaaatattcagttgtttcaaaaaatttaaatatttttttgaaaatttattaattgactgattttcaatttaattattttttttgacgcattaatttttaatccagatcgggtgatttttaacgataaattggatctaaaactaatcaaccctttctgaattggcttcaaatttgattgaattttcatctaataatagctaaaaaaatgatcagaaaaattttattaggtgcattttgcattgctcagttttcattggttcaggctggagcttttaatgaaaatccggtttcaaaaatcagttatcagcaggaaaaagttcccaagtcgtttattattaaaaccaaaaagtttaaaattaaaattgataaacaacccaacggaaattatctatatcaatcctgggcagccaacggaaaggtgacttcgaaaccgagtatgattatttcggacggagaattaattccggacggaacaggcggaaattattactacgagtttaataataacggatatacttaccagatctggagaaattatttaacgagttcggcgaaaaaagctccgtatactttaacggtaaccgacagaaacggcaaaacaattgtcaatcaggatggttatattgtcaaaaattaatttcaattctatatttaagtcctgacttcaccgtcaggattttttttgtctttttaaacaatggaaaattgtttaaattttcatgaatgacaaagggttttacttttctggtgaaagataaaaaaaatagatagataggtaaggctgtagtttttattttgaagatgttatctattgaagatattgttgaaatagtgaatggatgactgatttttagccccaattgagcggcatgtctgagctctttttaggatttcggcggcagcttcgctgccgccgaaatcctaaaaaagcgagtagcgaaagtgggaaaaagcttcaaagaaaagatatggattggaaaggttaagtttgaggttgagattaaggttatcctatctgtttcccatttcgtcattaaagttattctaaaaaattgaactccttcggagttctgcttctggattatctctttctgcttcacagatatgattcttgagaattttttatgtgtagaaaaatggtattatttctaatattttggtaaattcacttaaaatattcaatatccaatggcttttaccattaaatcgaatctgatcgacatcgttgcaagggaaacctatcctgctgaaatcgttattaaagacaacaaaatcagttcaatacaaagaatttcggaaaagcaggatacgtatgttctgcctggatttattgatgcacacgttcatattgaaagcagtatgttggttccgtctgagtttgcaaagattgcggtaaagcacggaacggtgggaacgatttcagatcctcatgaaattgccaatgttttgggagtttcgggggtggattatatgattgaaaatgctcagaaagtaccctttcatttttatttcggggctccttcgtgcgttcctgcgacccattttgagacggcaggtgcggtgattgattcgggtgatattgatgggcttttaagcaagaaagaaattgtatatctggctgaaatgatgaattttccgggggttatttataaagatgaggaagttctgaaaaagctggaatctgcgaaaaaacataacaaaccgattgacggtcatgctccgggtttaatgggggaagaaatgaaatcttatttcagtgcgggaatttctacagatcatgagtgttttggttatcaggaagcgctggaaaagcttgaattcggggtaaaagtgatgatccgtgaaggaagtgcagcgaaaaattttgatactttaattcctttattaaaagatttcccggatcagatgatgttttgctgtgacgataagcatcctgataatttgctggaatctcatatcaacgatcatgtgaaacgcgctctggatttgggttatgatttgtacgatgtgctgcgtgcttcttcgtacaatgtagttaaacattataatttacaggtcggattattgcagattggcgacaatgcagattttatagaaatcgataatctcacggattttacgattttaaaaacgtacatcaacggagcattggtttcagaaaacggggaatcttttattgaatctgtggaagctgcgacagtgaataattttagctgcagcttaaaaagcccatcagattttaaggtaaaaagcgaaggggaaaaacttcgtgtgattgaaacgctggacggacaactgattacaaaagaaattcatgcagaagttttaaataacgatggttttgcagaatctgatcctgaaaatgatattctgaaaattgctgtggtgaaccgttatcaggatgcgccagttgcaacagctttcattaaaaatataggcttaaaaaacggagcgattgcttcgtgtgttgcgcacgactgtcataatattgtggtggtgggaacgaatgacgatgacatatgcaaagccgtgaatctgatcattcaggcaaaaggcggaatttctcttgcccatgatgaggaagaaatggttctggaactgccgattgcaggaattatgacggatcttcctgcggaaaaagtagcagaagcttatattagattagaccggcgcgcaaaggaattgggaagcagattacgagcgccttacatgagtttgtctttcatggctcttctggtgattcccgaactgaaactgagtgacaaagggcttttcaacgggaaaagttttgagtttacggatgtctttatcaaataaattttactgcaatttatttgataaaaaacacacgatttatcaatttccaataacttttcaagatgttgtaaaattaaagatttcagactattcttttttcgttttccagatcagcgtaaaatcggctttcgttaaagctttcttttgcagcgttgtagccaatgttaaaaatctgttcgagacggtcttttcttctttcgaatgttccgtagatggaaagttcctgcgatgagataaaccagtcgcagtgatcgaatttaattctttcgatgcggtaagaaagcagatcgtacgaacgggaaacaatggctttaatcgattttaaatcattgattttgacgtcttgtggaggagaaacgaaaactccgatcagcttatcgcaatcgtctctgatgatgtctgcgggaaaattattcagtactcctccgtcgcagtacatttcttcatcgatgatgtacggagtcgtcactccgggaatggagcacgaagcaataatggcatcgacgattttaaaacttttttcaaagattttttcggttcctcctactaattctgttgccacaattcttacgtctttatcgagatcgcccagtttcatttcgccgaaaataggattgagataatttctgaaaatcaccgaagaaaccaagccgggctggttgaatgcaaaatgcttccagttgaaaaagtaaaccgaattgaaaaattctaaaatttcctcgggcgttttacccactgcatgaaggcagcctacaatggaacctgcactgcagcacgaaagaacatcaatattgatatttttttccgctaaaaattttaaaactccggcatgtgcgatcccttttgttccgccacccgataaaacaagcccaactttcccaaattccatagattaaaattaagaaaacaagtcgataaaaagagattaatttttctaaatgtggtgattttgcattattttaacacaaataaaattatgcttaaatgaatattgatgatctggtcttatttaaccagaaaaactataatgatttttagtactaagtatttaatgtaaagcttttttaaaagaggttttcttcaataagaaatagtttaccccacttttttatcgtacaactcaagaattttcagaagatcgtcatctgttttccaggaatctatcatagcgagaagatccggataagccgcaaatcttactttcaggctatttttaagactgggattgaaaaatccggattcattgatgatttttcggtttctgccgtcgattaaaaagtctgttccaacaaattttaagccgccgtgaggaaaaaatctgtaccagttcatatttttgccttcatacaaaatttctacaaaaccattgtcaaaaaccattttaccggcagaagcataatattcatgagtggtattattttcatcggtaatcttaatgtattccacatcttttggttccacccacgtttcagccccggaagaatccctcattttcatcttaagtaacacagtggctatataatattttgtattggaaaatttacctacatttctgatcttcgttttgatggtatcgctggatgttttcagaatgtactccacaggaaaataccttttatcgtctttgttctgagaaaatgaaaagctaaagcatacaaaaagcagcaaaaaaatgatttttttcatgaatggtggtttaaaaaagtccggaaagttaccggactgatatttaagtaagaatgttaattattaatatatttttcaaaaatccttgagaagtctttctgattgtatttatcgaaactgttggtattccatgcaaaaatatattcgttgattgctcttaattcctgacttttggaaatgttttcctgctttccggaagcaactgttgtaatggctttctggatgctgtcgttagagaaattcagcaaagaatgattgtggtgaacttcctgctgaatcgccaaaagtgctttatataaatctttcaactgatcgatctgaccttttgcaacgctgatcatcattggaacattcccgatattgaaagaaatttctacatcaagatcaatggttcccgccgtctgtaaagcaatattagagaaaggaaactggtaatattcgtatctcttcaagactctttttttgtctaacgcactggctccgtcgatgtggatcaaagctctattggtaaagcagtattcgtctcttttggacttaattaaaaagaaaattttctcgttatcttcggaaaggatataatcgtccgaatctactttgtcataatcctgtgaagggatgattttaccgatatctcccaatcctaaagcttccgcagctaattttttaaacatagtttgttgtatttgtattttatttccggaataaaattaagaaaataactgagataaaatcaaaaaaaatcatcttaaagaatgtttaaatttgattaaatattcaaaaatttcattcattttttgacgcaaagtttttacttaaagatttaattatttaaatgagcaaagaagaaacaacaagctgatttgatgaagcaatgttgtcaggcttcgtgaagcaaattttatttgcctttgctttctaagaataatgtgtaaagttgaattaaaactttgcgtggtaaaataatcgaatcataaaattttaaatatcaaatttaaacagatccttttcaaagagaaaaaccacagactcctaatctgtggttttgatattgttaaactttgtcaaagattttcaactttggcaaagtgaaaaattaaatgtgaatcacttctccataagcagccgctgcagcttccataatagcttcagaaactgtcgggtgcgggtgaatagatttgatgatctcgtgacctgtagtttccagttttctggcaaccactgcttccgcaaccatgtctgtaacaccttcaccgatcatgtggcaacctaaccactctccgtatttagcatcgaaaataactttaacgaaaccatctgtatttccgtttgctgttgcttttccacttgccgaaagagggaattttcctactttaatttcgtatcctttttctttagcctgtttttctgtaagaccaacagaagctacttctgggtgacagtacgtacatcccggaatattgccatagtcgattttctcaacgtgcattcctttgattttttcaacgcaggtaattccttctgccgaagcaacgtgtgccaaagcctgtgtagggatgatgtctccgattgcataataacccggaactgaagtttcgtaccattcgttgaccaaaactctacctttgtctgtctggattcccacttcttcaagaccgatgttctctatgtttgcagcgattcctacagcagataataaaatatcagcttcaagaacgatgtttccttttgctgtttttacagtagcttttacgccctctccgcttgtatcaacgctttctactgaagcattggtcatgatctcgattcctgattttttcagagatttttctaagtgtttagagatttcctcatcttctacaggtacgatgtttggcataaattctacaacggttacttttgtccccattgtattatagaaatcggcaaattctactccgatagctccggaacctacaacaatcatagattttggctgctcaggaagagacaatgcctgtctgtatccgattacttttttaccgtcctgtggcaagttcggcaattctcttgaacgcgctcctgttgcgataatgatgtgtattcctgtatattcagttacttttccttctttatcggtaacggaaacttttttacctttctgtacttttgcagtacccagaataacatcgattttattctttttcatcaggaattcaattcctttgctcattttcgatgcaacgccacggcttctctgaattacgttcggaaactcaaagctagcttccactttattcaatccataatcttcagcatggttgatataatgaaaaacctgagccgacttcaataaagctttcgtaggaatacatccccagttaaggcagattcctcctaaattttctttttcaatgattgctgttttgaaacctaattgtgccgctctgattgctgtaacgtatccaccaggaccacttccgatgacaataatatcgtaattcattagtttaaaatttttatgcgaatttaaggaaaaatatcggatgtatggcattctgacgaaattgatcccttaaggttttgtttactatttttcatcatcagaagctgtaattgctgaagcttaaaataaaaatataaaatcagaaaattttaaaacattcattaaaaccgctattagattaatattataaacataatttattaaaactattaaaaatgatagtaaaaactaaaaatttatattaaaattttaatatttttgaagtaatcaattaaaacaaacatgatatgaaaaagattttttcgatttttgtgatgtgcggaatttttgcaaacgctcaagttggaatcagtaaaaacttaccaaccagcacattagacattaacggatctgtaagcgcaaattacaggcaggtaactgcaactgcttattccatcgttgccaacgatcattacatcacttataatggcactgccaattctacgtttacgctaccggtaataggttccggagcctcaagttttacgggaagaatttataagataaaaaatatttctgctttcaatattactttacaggcttcagggggaaatacactaagaatagacaatactccggtttctacatttatcattcctacaggagcgtatgcagaagtggtaaataacagcaacactaccggaggaacatgggatctttcttttataacgctgccgaagcctaataatgtggaaatctacggaacacagctttcgataccgccgcacgcttcgggaacagctccggttgccgactggaccggacattctaatacagcatatgatacgggaacaggaactgatgcgtggtgggtcatcagcaaagcatctacatcgttctcggtaggaacaggtttttccaatgcgagcagaatgactctggtttacgaatatcagggaactccttttaatattgccaatatgaatccttcgcttaccgcaggaaataattccagttttccggatgttttcacggcttcttttgtaagccttgccaataacggaacttctggtaaaacgagacttacgggttctgttgcgcgcgtggattttgtaggaaataatggctccaataacagtaactggaccggaacattccttttaaatctattgcttgcaagaaaggtttattaataagcctgtttacacttttttttaaccgaaaaaggcataaaagataaactaaacttttatttaaagccgatcattataaatgaaaaagcttataatagcttttaaaaatctttgacttttattccttagaaaaatataaaaaagaggttatctgccttagatagcctctttcatcgtattcggaaattacatttttcttagtaatctcttctggctctggtatttttcgtttaatgctcttagctgatcctgcttcattcttttggtcgcaagcggatgattcataatggcctttttctcggcattgtatcttctgtcaagctctctcgatttgctgttgatcaattcactttttgacggatgaggaggtgcaggtggacgtctctgtccgtaagcattcatggataatcctactaacaaaacggttgatataaataactttttcataatatttactttttttgaatgaatttatcatgaaattcattcctgttcggtttaaatattacacatttcataccataatttttttatgccgagctactcaacctcaatattttgtttcaaaggtagatttttggaagagtttccgacaaagattctgtacgttcctttttccacgatccagttcattttttcatctaaaaactggaattctttcaccggaacttcaatcgaaatctgtttagattctcccggatttaaatatactttctgaaatcctttaagttcaataattggtctggaaaccgaagccagcagatcttttacatacaactgaacgacttcgcttcctgctttcgaacctgtatttttcacagtcacttttgtcacaattgtatcattttcagaatattttgttttatttaactgtaaatctgagatttcaaaagtggtatagctcagtccaaaaccgaaaggatacaatggttcgccgctcagatcataatagtcgtttccgcgtcctgtaggatgatggttgtacgtcaaaggcaactgaccttcttcaaccggaaaggttattggcagttttcctgatggattttctgctccgaaaagcactttcgccacggcatttccgccttcttctccgggataccaaacatctaaaatcgctccgaccttatccttccaagccgtcgtttttatggcagaaccacctatcaacacaaccgttgtcggtttatttaattttgaaacttcatggatgaatttttcctgatttccgggtaaacttaacgaagaacgatcctgaaattccccttcatgaattccggctgtaacaatgatgtaatctgcgttctgagcctgcttcaaagcatcattaaaatcttttcggtagtcttgtaagccatagttccagatcagttcaatattggcttctcccctgttttcgtgaaattcaaccacaacatcatatttctgacctttattaaattctacttcaacggttttggttgaatagctcagcttttcccaatggtcaattaacaatgaatcgtttaaaaataatcgaaagccgtcatttcctcttagtcccaactgatattttcccgattttggggcttccaattttcctgtccaccgaatgctgtaattgtcgggctgcagtttttcaggattgggcgaatacaaagtccatttgaagtttagctgttcgtcttgtctttcaaacgcagcatttccttttaattctaaatctgaaaagtaacttccttttaaaccttttttattttcagaagacaaaacttcagcaggaacagtcagaaaatctttcatattccaatcgattccttttgaataagtgatttcgatatttttattttcagctaaatttttaattccgtccaaaatgctgacctttttatttcccggccctgaataaccgcctaatcttgcatcaacggcatctgtcccgacgactaaaatctttttatatttttccgaaatcggaagggtaagatgattattctgaagcaagacaaaagattctgccgcaactttttctgccaatggtttgttattgattttctttaattcttcaatgtctttattggaaacgtaaggattttcaaacaaaccgagttcaaattttgccctcaaaactctcgcgactgcatcatcaattctttcctgagaaattcttccatccaaaaacggaggaataaagagtttataatgttgatattccgtctgaaaaatcacatcaagccctgcattgatcgcctgtgcagaagcatcatcgtaatcttttgccgtaaaatgtaatacatttgctcctccgactgcacttgcatcgctgataacaaatcctttaaaattccagtctttttttaatttttctgttaacagccaatgatttgccgttgaaggtcttccatccagtaagttataggaagtcatcaccgatctgctttttccctgttgaaaggctttttgaaaaggaattaaatgggtttcctccagatatcttttactccaatgaatcggatatgaatctcttccgccttctccaacgttggctaaaaagtgtttcggagtggtaataattccctgattttcaaaggaactgacaaaatttaccgccattacagaagtcagaaacggatcttcaccgtatgtttcttccgttcttccccatcgtacgtcgttcgataaattcacaaccggcgtcagaatctgacggattcctctcagtttagattctttggcaatggctgttgaaacttctttcatcaactcaggattgaaagttgcggataaaccaattgcttgtggaaaagcagttgctccttcacgcatcagtccgtgcaaagcttcatcgaaaggaattatcgggattcccagtcgcgattcttccacaaaatatttttgaatggcattgatttttttcgcaagtctttctgcatcttcattggcgttgtatttcagcatttgtcctgcaactccgcctccctgatttcctgcgctcacctgcaaaccgaagattccatgggaatactgacctttcggaacgttatccagatctccgggaatcatgaagcactgccagaatttttcttcgggggtcatgcgttttaatagatcttgaactctggcttcaacaggctgtttggggtctttgtataatggtttttgagctgtaataaatgttgtgctcaataacgaaattattataattttaaatctgagtttaaaatgcattgtaaaataatttaattttaaaatgttcttttgtcttgaaacaaaagaaccaaaagttcaagacttggaactctcagctaaaaataaaatctgctctctaaaaattctaaaactcgcgcgaatttaatgttggtttttcagttcaatatttgtgtcgcgctcaaacagtagaattttcttaacgttcacagactttattttcttaacgcttcgatttcctaggtcgttttttagtctacaattttaactactgcgtaatctggattacggttgaatattttaactggtttctttcttttggtaaaataatttcaattgaatttccggtttgtttccaatcaattttgttagataatcctaaaatttttaatgattttggtttaaaattttccggaattgtaaaatttaacgtagaaggagcgagataattgtttttttcatccagatgaaaaatattcactgtttttccgtctttgcttttcgtgtagtaaaaatttccgtcatgataaggggcaatacttcttgttacaaaaaccgcagactgatttttatccatccatgcagaaatttcttttagcctttcataaaccacaggatcgtaatctccattcggtccgggagcaatattcatgaggtaatttcctcctcttgaaatgattttaattagcgtttcgatgattttctgagaggatttgtaattgtcgttgggaacatacgaaaacgaatctcccatcgtgatgcagctttcccatggaatggaaagtggtttttcaggaaccgcctgttccggtgttacgtaattttcccattttccggaaacggtacggtctacgacaatgatcccgggttgatttttacgcgccatggttccgattttatccatatcgatgtcctgttcaactttaatggttctttgccattcaacattgggatcgatggtattaaagggacgaacccagcctccgtctaaccaaaggatatcgattttaccataattggaggtgatttcgttgagctgattaaacgtaaaatttttaaagctgttccatttttcaggatatttcttcggatcgtagttcacatttcggtcttttggcggaaaatacgaccaccagtaatcgtcggaatgccaatcgggttttgaaaagtaagctccgattttgaagccttcttttcggaatgtattgaaaatttcttttgttacatctgctttcggatttccggaaaaaggcgttttggaggaggtaattttataatcagattgttgggtgtcaaacattgcaaaaccgtcatgatgttttgttgtaaacaccacatatttcattcctgctttttttgcagcttcagcccatttctgtggattgaactgaaccggattgaaagtggtctgaagattttcatagttttttacgtattcgtagtatgattttccgtgttcgggttttctttgtgtccatgattcgtcttcgggacagaggctccagctttcgacaattccccattggctgtaggttccccaatgcatgaagagtccgaattttaaatcctgccagttttccagattttgaacaacaagcggatcggtaggtttctgatagccatcagaaacattgtgagcctgagaaaataaagcggatgacgtaagaagtgatgaaaggatgatggtttttgctttttgtctaatgaacattgacgtttagtttttgctaatttagtatttcaccgtaaatttttaactacaaaaggcagaaaagattagaaatacattagaatttaagattattatcatattctatagaagaacacattagtttttgaaaatcaaagattttctgttgcgtggatttctaattccgcttatttttaaaccaaatcgttaaatgcagattcaatatttgagtaagtaaattcaaagccgcttttgattaatttttcagggtagacattccggctttttaatagtaattcggtttcggtgtttaagaatattgatgcgatttccaattgccaaaccggagcattcaatccaaacgggatcttcatttcttttcttaattttttcatgaattcttcgttggataaaggattaggtgctgtaatattgatttcacctgaaatattttcatgttcaatgatgaattctacagctctgcaaaaatcttctatatgaatccagcttacgttttgatttcctcttccctgttttccgcctaatccgaatttggtgagcattttcagttttggaaaagcgccgccgttatttcctaaaacaatggaagtccgtaacgcaactttccgtagattttctgtttctgatttaaaaaattcattttcccagcttttacagatgttcatggaaaaatcatcaccgatgattccgttttcttctgtgtttaattgcttttctgaatgaacgtaaatggttgcggaacttgtattgagccagattttgggttcatggatacattcatcaattgcctgctgaagaacttttgtgctttcaattcttgaactgtaaatttcttttttgttgttttccgtatatctgcaatcgacggattttccggcaagattgatcagaacttcggaattttcgagtatttttttccattcgcccaaagttttggcatcccaatacaattcatttttctgttttgggtttcgggttaaaatgtatacttcgtttcctttttcagtaaaatatttttcaaggtttttaccgagaaagcctgttccggcggcgatgattattttcatttttggttgattgcatttagttgattgttgatagttttaatgttgggatgttttccttcgttaagctcaggataaacttaaagctcagcatgacatcgctaatattaattgtttagcaaacgcccgataaatacccgcatgaacattttactttttatttggttgttttacttttagatcaaatacttttttgtttttacttcaatttcagaaccttctgcaagcattacagacattggtttcctatgatttaaacagtcaaaatcattaccgtatactttttgaaaatttatttttaactgatagtttttgaccaaataataatcccatttcagatggcagacttgatattctgatgttttattttctttttttgtgaaaccgtaataatgctctgtgatgaattcaaactctgaattcgcttccatttttaaaggctgattttctgccgtgattgctatggaatgccagattttgtctttccatgaatattttattaacaactctccgttttcttcatgcagtatatttttcatgggcattgtttcgtaatgttcctgataaaccgaatttgccacaaaactcaaagccagtttcggaacaatttctttgatgaaaaccactcctctcttcaattctgttccttcttttttctttacataaaaccttaaatttacttcttcaaaatttctgtgaaaagggatgggaaatccgagtaattttgtatttaaaaacataaacccgactacacttacatagcattttcccttgtaaaaatcaagttctgtacctttgggaagatatttttctaaaacttcgggattgatttcgtagttgatgatggctagttttcgccattcggcttttaggaagttcatgactttggttgattgttattcgttgaaagttgatggatttaaatattgagatgctttccttcatcaagctcaggataagcttaaagctcagcatgaaatctctaatactaaacgtttcgacgctcgcttcgctcgcgcttctgcttattttccgcagtgaattttatcaatttgtttctctctaaaagaaactttttcatgtaatttttaagaaacagaacatcgaaaatttttcctatgattccgaaaggagaatgaaattcgaagatgtctgtcatgattgtgtttttatcttcctgtctgaaaatatgctgatgtttcatggatttgaaagcgcccttcaacatgatgtctgtaaaatgataaggcttcttcatgctgataatttttgtagtcaaggtttgatagattcctaaatgttttgctctccacattaccgtttcgccttcttcgatgagtcctgaagttcgtcctgcaattgctttttcacctgttttaaaagttgatttctgatgcagatcgatgtctcttgccagatcaaaaacggtttgaatgtctgctttgatgatggtatctaaatagattgttgacattttaaaaagtattttttttagtttttaaagattcatccagattaaaattgctaaaacagttattcggaaaacggtccacgaaattgtcggaaaaaggtttaattttaaaattctgcttcttctgagatgttctgaaaacataacaaaaaccacaattccgaaatagataactgatgcatttacattgagattaagaaataaagccggaatcagaagtaaagttccaattaatgaaaccgtcatcatatttcctaaataattccagattttctcttttaaataagtttttaaaattaaagtctgccaaacgatttgtccgcaacagatcgcaaattctctccaaaaattctgaataaggtttaatcccaatttagatgaaaatatgcttaaaatatatcctgaaaaaatgaccacaaaaacgatgtaaaccaatctgtattttagattgaaatccggaacacaggctgtttccgtatcgtcgttttttgatgggatgatctgctttcggttataagaaacgaaggaatacagctttttgaaaaaccaatataaaggctgaatcctcgcaattttttcaagctttggaaatgaatttccgatgattaacaaaagactgtctaaaccgtaaatcactgtatttttttcgtgatcgactaaagcgatttcattttttgcgcggttgaaatcaatgaggtctttattttcgaaactcagatctgtaaatgcttctcttccgttttcatggagcattccgcatttgatgaagccttttgaatagatgttacacataggacattcgttgtcgtagatgagggtgtggtttttgagggttttcatggctgttcgtttaaactatttttagcatcaaaaaaactgatcattaagggctgaataataagaatgggtgaaagaaatatccaagacattaccattaattcaaaaatatttttcaggttttgttcagtgtcttcaaacttgaataatgatgataaaatcaggattaaaaaaccgattactacataggtcgaaataaaaacatatacttttctggaatctgtttttacatatttcttgctgaaagtcttgatgatattcagaaaatattgggcaacggctatcaggaaaaattcaactattattactactcctaaaaattcctgttgtgtaattattgctgtaagaattgttgcaagaaacagtaagattagcgattgctggattctgagatcatatgtaagaatagttttcatgattctgtttttttagtattcataatttttataacaatctataatgtagaggattgcaagtaccggactgtaaaacactgatgcgattaaaatatatccgaaaaaattggtgacatcattattgttattaaaagccaaaataatcagccatgaaatccaaacaggcattataaaaattccgtagacaataaacagccaagatttctttgttttctgaaaggctctgctgataaaactaatcaactgaggtattcccactatgaaataaaaaagaaaaacagtagcattttcaaaaacaacaattcctaagaataccaaaataagtccgattacaaggaatgaaagttgaatgtaaaagtcgtttttaatagaagttttcatggtcattggattttaaagtttcaaaaaatctcctctcgttctctttttctggattttgaaggtgaaatacatccagattttaaatagcagtgttttcatttttgatgattttatctttgttcatggcgtgtttacgacctttcaggaaaagaagcaggttcagaagcatcatcactccgaggtagatggaaaatcctccaattttttcgcttaacgcaacaaccagcctttcaatggtttcaatttgaaaaaattcaatgatacaaagggcaaaaccgagatttaaaaggtaaaaaccgatcttgaataaagagttggttgccattgcaatgtcttctttctgatgaaaaatatcgatcataaacgctttggaatttttaaaaagaaactgggaaaccagcacagtaagaaggattacaattggcagatagatcatgtatgcctgaaaattgtacgttgtggtaagagctgttgcattcatagttttattattttatggttaaattttttcttaaaaagtatagtgcgaaaatgttcataaagtgcagcacacataaaatcaaggtgatataaccgattctgactgccgtcacagataacattttttccatagaatctactttttcccaatgggtaagatttaatgcgatgtatccgagattgatgagataataacatcccaaaagaatcctgttgatcgttaaacacagatctgcatcatgaataagatagttcaggtaatgttttcctgcgttgtagcatcttcttccgacatcaatggtgatgtaggaactgacggaaagaaaaagcagatatgaaacaatattgaacattttataaatattatattttcaataaattttgaaagttaatttcaaaaaaattatttatccgttttattctgctgcatctttttaacattataaaagccatagatcagatagtaaatattaaaaagtacgcctccaatgcccatgaaataaagaacatactcaattttagaatcgttgaataataaaaccgcaacaaataataactggaaaaataacaagacaccataaaaatagtaccagtgaagtttgcttttgctaagtgaaaccctcaataaaaatcctatcagatttgaaacgccaacatataaaagagcaataaaaaaatctgatcgctgtgttttctcatagtaatcaacaatcattggcaaaaagaatacaaggctaatgactgtctgaactattgcttctcctgttaatattttacgtttcatgttttgagtttttattgttattatattttcaataaattttgaaagtttacttgaaataaaaaaggaaaattttcctttttatattcatcctgttcgtttcgttcagaataataaatgattacttcagtaaattcgtaatctttccaaccagccaatgatcgtcactttttatcgcgagatccatgatattgtttatttttcctgttacagaactgaaatcgtccattaatttaatgaactcttttgcttcgtcagaatctttgtcttcaatatttttcagttcttccagaaacgaaattacaggctcaatctctctctttcttctttcttttgtaatctgcttgaataaaaaccagacgtctttttctgccacaaaatattctttacggtcgccctttacaaattcttttcttacgattccccaatccatcagtgcacgaagattcatattggcatttcctcttgaaatttcaagctgctccatcacctcatcggtagaaagcgctttaccactcgctaaaagcaaagcatgaacctgtgccatcgtacggttaatgccccaattggtcgcaaatgtaccccaagtctgaatgtatttttctttagcttctgaaagttgcattttgttttacttttaatttctgatacaaatttaataataattttcgaactttcaataatttttgaaagtttatttaaaataaaaacagacatcctttgagaatgcctgttcacactaactttaatttatttacttatctttttataatcctgaatcatttttacaaatccttttctatatccttctttatcctcacctttgctgtctttcgccattttttcgatctcggataaattctttctcataattaaatctgaatctcttaaaaccagtccgaaccaagcaaccgatgacgcaaacttaaaatcattgctttctttctgagaggcagtattttttattacatgaacaatttctacactttttgttccctgaggttttttatatctgaatttaacagttcccagttcatttccagacttttgactggcagaatttgaagtatatttaagtttattctgtttgggtaaaaacttagaatttacattggcaggaatgatttcgtataaagccgttactgtatgtccgcttcctaattctcctgcatcaattttatcatttgtaaaatcctcatttctcagttttctattttcatatccaatcaatcgataagattttacgaatttaggattaaactcaatctgaattttaacatctttggcaatcgtatagatatttccggcgaattctcttcctaaaaacttgttggcttcctgcaaattatcaatataggcataatttccgtttcctttgtcggcaagcgtttccattttgctgtctttataatttcccattccataccctaaacacgtaagaaaaatgcctgattttcttttttcctcaatcagactttcaagatcaccttttgaagaaactccaacgttgaaatctccgtctgttgccaaaatcacccgattatttccgtttttgatgaaattttcctgcgccaacttataggcaagttcaattcctgctcctcccgccgtacttcctcctgcttccaatctgtccaaagattcaataatttttcctttctcagaaacggatgtcggaggcaatacaacacccgcacttcctgcatataccaccattgccactttatctaccggtcttagctgatccagtaatatttttaaagaagattttagcaacggtaatttattttccgcagccatagaaccggaagtatcaatcaggaaaacaatattggaaggaggaagattattcatcggaatattttttcctttcaagccgattttcagcaactgatgattaggattccatggattttttcccaattctgtactgatagaaaaaggctgattgttttttggctgcggataatcatatttaaaataattaatcatctcctctactcttaccgcgtttttataaacttccccatactcaatcattcttcttagattggaataggaagcgttgtctgtatcaatagaaaatgtggaaagtggttgattctttgtcaattcaaacggattttcaactaaagcatcatattcttcattcgtataatcacctttccgcgcaactttcttctttccttttttagttcctacatgattattgtatacttttccttgaagctgatacgatctttcaagagcataggaatttcccggagcataagaaatttctgatgcagtaaccgatttcggtttcgaacagccgttatattccggtaatccgggaacggtaggacaggcatcgtctttatccagaattccgtcgccatctgtatccggccacggacagccgttgttttctgcgggtccggcaaccgtcggacaggcatcatctttgtctattattccatctccgtcggtatccggaaaaggacagccgttattttctatcggtcccgcagcttctttgcattggtcttctttatcgggaacgccgtctccgtctgtatctgggaacggacagcctttattttctatcggtcctgcaatttcaggacatttatcttttcggtttttaactccgtcctgatctttgtctttttcaatgcttaatttctctttttcagtttgatgatctgttgctgttttggttttacagcccattaccaacatcaaagccaatatggtagttcctagttttttcatatgtattatttttctgaaaatataatcattttccgtttctctgttttaaggatgcagattttcgaaaaagttgcagtggagttgatatttttttgttaaaacttcaccctcttcatttttataatttaaacttgtttaaactaatttcagaattaaccgcaaaagggacaaaagaaaatgttaaagcgaatttcaagaataatcaaagcactcaaaagaataaaaatcaaagatttttaaaaactatggtgagctttttcatttataataatcaactttaaataaaaaatttagcagatcttttgtgacttttgcgattaaataaaaagtttaaacagactttttatttaaatataaatcaaacagttaaaaattaaacaattttaaaacaaactttaaggctgaattctgacttttatcccttcattccaaaattttgcttccggcatataataaaggtatgcgttgctagcttttcctgtatattctcccgcaaattccactttaagatccagattgatggtttttatttcgttggcatcaaaatgttcccaatacagaaccagataattatcaaaaatttcgtaataggaaacctgctttttatccagaagatctttcagcaaagcattctgtaaagttaatcctgccggaattcctatttttgccgtcaccatcggaagctggttatttattttattctgaatggtaattatcattctgtctgtctctcctgtttttgctgtttcagattttaattttgtgttcagaattaaagaaatttctgcacttttcggagcttttaacgtgtaatattcataatccagtttgtaaggaagtcctctttgtgtaggataattgacactgattgtattttctccattcttaaaagcagaacccaccgaattattcgttctgatctctgctccgtttacttttatcaaaggtttttctgtgccatataatttttcattttttgaaaaaaatacagataatgcttccaaagccaaagttgttgcctgagtagaaccgaagccataatatccgttgaaattgatcagatgatctgcaacttctgcaatttttaactggctcaactgctcatctttctgcaaagccatcagataaagtgatagtgtttcagcatttgcagaaaatcctccggaacctgtaaaagtggtttttgtttttaaacttttcccttcaaactgactgtttaaaagagcaaccaactctttatactgctgatttttgcctaaattataagaaatatttgccattaaagccaactgataagcatcttttgtcgccaaagcacgtttcagattaatttcgtaggcatcgtccagatttctaattccggttttagacaacgcatacaaaacatacatatttctcgaccatgcaaaatctgaatacggtatgcttttttcatagtttcttcttacttcaaatattccgttctgattttttttggataaaataaaagaggtaagatcctgaatgattttaggttcaatattcacgtattttttcagatctttaaattcaagcaatgcaaaagcagaaagtgcaacatccgattccgaagatccgaagtaagtgaatccgccgtcgctgtttttatagctcagcattttctgatagccttttttcatatttttgatgaccagactttcggtttccggcgtaatttttttaatctgttttaaataatccagaatgaaaatatttggataaacggttgaagaaagctgctcaaaacatccgtaaggttctcttttcaggcgttccatattttcaaacatctgcaatgcattgttttcatacacataataagacgagaagaaactgccttcaatataatccggaatatcaattttgagatcttctgttttgttattgataactgaataacggtgaggaaatcctttttcgtcaactttaaagggaagaatcatggtttctctgaaatcttctgatcttacggtaaactgaatattcgattccaccacttcattggtctggattttcacaaataatctgcctgactccaaaggtttcaaggtaatcgcgctatctgattgtaccacattaacacgattcggaacaataacgtccatcattatctttttggtttccggagaattgtttttaaccactaccggaatcatcatctgatctgttcttgtaagatattgcggaagtttcgcatctatggaaatcagactttgagctgcataggttgtttcatcacgcccgattaagcctgaagaggaaattccttccgtcatgattctgaaagtagaactggcatcggaattataaaattcaacctgtgcttttccgttttttcctgtctctactacaggattccaatacagagcttcacgataatcgtgtctgtaagaagtgtttgtcgttttgtagacaggataagaaaaatttcttgtgtattcgtacgaaaccagactgtcattgggaatattcaccaatgcataatatgatttcggcgttacatcaaattttatctgagagcggaaattcttcaaagaattaataacgatcacaccatttgcgcctctgtttccgtaaatggcagttgcagcggcatcttttaaaattgttacactgttgatgtcactcggattgatgactgttttaaaattctctacaggaacaccatccacaacatacagcggatttttattggcaacagaagcatttcctctgatctgcacattgagataacctcccggctgattggtgggagtaataacaagtcccgaaacttttccggctaaagaagacataacgtttggattctgcagttcatcctttcgaacagaaacaactgctgcagttgttttatcctttaaagaactttgcgagaaacctaccactacaacctcttctattctcttagatgttatggtatcacttctcatgcttcctcttgaaaccgatcgggaacgtctgttttcggaggaagattttgttctttctgtggaagccgttttcggaatttccttttcagcatcttcacgcatttttattttaccttcttcttttacggtttcttttacaatttcttctacattaatattattcagagattttgcagccaaaggatttattgccagtctgtaagataaaatccggattttcacctcttgttttggctgtacagatttcgcaatcagcttattggaataatttctgttgagatcataaaaataaaacaatccgttttctgaggtcgtctgtttcaggattttaccgtcctcaaggaaatacacatcggcttttacaggatttcctttttcatcttctacaattccatagatgggatttttcttttcgggaagatatttgtattttctgtttttgataacttcgggagccatttcaaaataacggtaaccattggtaagcatcaccaaatcgaggcttctggttcttttttcttcttttttatcgaaataaaactgaggtctatcaatttttcctttcagctcagaatccatcagcagccacgaaagaatatgattctgcttatcgtctgcatacgtccagagtttatcatccacaacgctcagagccagatttgcgggaattggtttgttattttcgtctgtggtttcgatattcacaatcactttttctctcggaagataattttgctttaccggttttactttcacattcatctgtttgttttcattcgtaaagacaatgcgttctgccaaaggaatatcaccttcaaacaccgtaaatcggcaaataccgatcggaagttcattttccggaagttctaattcattcaatcctttttttaatgaaatgattttgctgtaaacttctttctcacggaaatttcctttgagaataacatctttttcatctgttgatcggattttaaaaacaatcttctgattttctttattgatattgaaaacaattccttcatcttttgccatcggaagcggataaacggctgaaatattttcaggtttcaatacttttgcataataattttcaccttttcttggtgtcagaagaaaacctcccatcccgaaattatacgctgaagtctccgtaattttctgatggttttggttaaaaatttccaaagttgcatcgacaggtttttcaaattcatccagaattttataggcaatattctgttcaattccattaatgaaagttcctccttccggcatgaattttatatcaagatgattcagtacaatcggaatatttcttgaaatagattctgtaaatccgtcgaaatttattttaatggttaacagcgcatcggaagattttaaaacagcgggaagtctgaatttcagttgatttttcccttctttatccgttatcagctttccctctgaaatcttttcaccgttatgcattaccgtgtaatctccttcgtaaaaaggaattggaagattgctgagacttctcatcgaaaaatcggcaagaacctcatctcctgctccatatccttttttaggaaattccagtttcatcagaattcttggcgaaacaattttctggagggtaatttctttttcgaaagtattttttccgtcttcattctgcatccagttggtgaaagcgcgcaatttgtatattccgcccttcatgtcgctgttaaaataaaaatagccttccgaataaccatttgtaatttcgtatttggctttttttacgaccgttccgcttggatcagtcaattcaaaattgacggctttgctctgatcggcgggaagattattttctgcctttaccgtgtaaattttaaagtacatttcctcaccgggtttataaaaaacatggttggtctggatgtacgttttttctttttcgaaatttttaaacggttcctgagcttttgaaagagaagcaaaaaccagaaaaaataatcctaaaataaatgttgtaaccttgaaattcataccttaaaattgaaatgaaaccatacagccaaaagttttaaacgacggaagattgaaaaaatccagtcctcttccgttttccgaatcatagaaattctgattggaatctgcgccacgattcgcctgccaaagaaggatattattcacatagaacgtaattcccaatccttttttaaattgtccgacatcgaattttgccgttagagaaaccgcattaattctcacataatctgctttctgaacatagtcttccgcaacgcccaaatatccgtatctcgtccatcggtttttcgaaacgtcctgattgggatcgtaaaaatcaacaggaatctgattgggatttccaccggaatttactccctgaaaaacataatttttaatatttctgtcgtctccggaattttgggaacgtccgtaataatcgagaacagcctgagttccgttccagacctgtccgccttttttccattcccagttgatgtctaaagtgagcattttataggtgaaattatgattgaatttaacgacaaaatccggtgtgggatctgctattattttagctccgtttgcttttttaggataacccaattcatcgataatcaactctccgttgttatttctttcgaaataacttcctacaaccgctcccagaacttcaccttccgacaatgttttataaatgtctttaaaacctgaaaccgctgtattatgatatcccggatttacccgatccacaatatctctgtacttaaaaaatgaagccttctgattcatcctgaaatctgaacccagataaacattatcaaaaaagaaattcacttccagtccgcggtacgtgtgatctgcaaggtttttcagttccagattgccattttcaaaaaccggaaaaatatcatggttgatttttcgttgaaaatattctgcttcaatgcctaaattgtatcttgaagtcagcctgaagcccgttttccattctttggaatcaatattcgacagatttttaaaggtttcaacttcctgaatcggaaaattctgatttgaattctgcgcattaagcaaagtggttgcgtaagaagcataggattttgtgatttccggctccgagcttagctgagtgtaggctcctaaaattttaaaattgatgtttctccagttgaatatttctttaaaagtaaaatatgcacccactttaggaaggaaataattatttttaagtgaagtatttgaaatgtagaaagaatttcctgcattcaatcccatttcgaaatcacgatagccatcataatttagcctgtattcgaagatataatcctgcgaagttctctggtaaatataatttttactgtttaaagtattatcaatctccgatctgttattattgacaataaaattgagattaaaacgatgtttccaataatattcatttaccgaataatctcctgaaatactggaattatacagtttattgttttgcgttcgctcattctgcacgccattgggaaaaccgtaaaccgaaggtttatagtgatcgagattcaggaagaaatcgttttcgtaagattgcgtgatattcagcttaaaatgactccagtcccgcgaaattccgaaattaaactgtctccttctatctctggaattgtattgattatcctgataaaataaaaattccggattgtctgcaaacttgctgtagcttctctgggaaccgtctgaaagaaaaatcttctgagcattggaaaaagaaaccggcgtcagtaaagaattctgataaactctgttgaacaagccaatcctgttggaatttgtcgctttattttcttcatatataaaagctgcatccaacgcaaattttaaaattttggagcttagttttgttttaaaagaattcagaatactgtactgatccatgaaatacatctgatctttctgttgtccgagatccagtgaaatccgaaacttttcatcgtagtagtattcattatttttgaaaaacagattcagcctcaattgattattgtatccaactgtcgttttaaaaatgtcgttgtcataagctttcgcgggagaatttccgttcataagaggaatcaactttccattttgatcatattcataagattgattatcaaactgtaaagttgaaatatccgatccgaaactgaacacttcattggtttcaggacctttccaaaccaattctccgttttcagaccttccctgaacatattgattctgggttttaggaaccgaatttctactttttacctctgctgaagtggtaaaacttccgtttaaaaacaaaaatttctgggttcgtccttttaaactgatgagattcttatcgatttcttttaggtttctgatggaataataatcaaacaaattaactttcaggttttgtcctgagttttctatactaaattcatttttccgctcttttgaaaccaaactgtcgtacgtattattttgaatattttgaacacttcttttttctatctggttttccaaaatagttttcagctcacgggctccgtatacaaccgctttgtttttaccgttgttccaaaccaaagtatcgtaatcttttgctgcgatgatggcaaagcctttttcatcggtaagttcataaactccgctgtttttgttcagaatctttaaaaaattctgtggcatttctttttcgtttaaaaatattccggaataataccgttgagaattctgcgcgaagagacagttaaccgcaagcagcggaagcagacaatacaacttcttcatggtatttttgttaattaaaaggcgaaaaaagaaacctccgaagaaatttcttttttcagatttatattgaatgaatattagttttggaggtttagagaagctactttttcagcagtttttcttttttaagcagccttttcagcattcttttttcttttctggaaatgtcttttgtttccaccagaacagctccattcgcggcttggtttccgaaaagtgcggttgctgcttctcctttaaatacgcggatggattctattttatcaggatcaattctcttgaaaagttcagagtctgttgcctttccgttgatgacaaacagcggactgttattggttttggatgaaccttcacaactgatcgagatatccacttttccggaaccctgtcttcccgaaattgaattgatattcacgcctgaagctgctccacgaattgaatttatcgcttctttgttccctattctgtttgccaatccctgataatttcctgcaattggctgttttcctttaagatatcctttattgtacgccagaatttcgggttcctgagaagattctttcagatcatatggattggtagaatagactgcttctgcggtatctgcaactgcgttaagctccataattttctttttctctgatgaagatgaatccagagaatttaccatcgaaactttttctttcttaattcccatcgcaattaccacttcagtattttgatttttaggagcgtcttcaattattttattttctctttcaagaactaccggttcttcagaacgtgcaggagaagctaacggagtagatgaaacaacaggaaacggagcctggattgcaactggcggagcttcagcagctatcgttacaggaggtaaagtttctttttggatattcacttttataatactgtcagctttctgaacgtgttccgaaatagcagcagaaggtttagtttcagaaatgatattttttgcaataacctgttgggtaacttccgcattttcttttttattggaaaagtaaaagattccggaaccgattaataaacttgcggcaattccgtaaggaagccagatcggaattgttttactttttttttgttcttttttgtctaatttttcttccacttttgcccaaactctatcaaacccagggaaagtcgcaggttcttccaatgttttagaagcctcgttgaatgttttatctattgaattgttttccattgttgtaaaagtttaaatgttttgattaaccaaaagttcctgaagtcttttccttgcaaaattgagttgggattttgaggttccttcactaatggaaagcatggttgcaatttctttgtgaggatatccttcgatggcaaaaaggttgaaaatagctctgcaaccttccggaagaaagttcagaaggcttaaaatatctttttcaaacgatacgttttccagtgcagaatctgtagaaacggcatgattttcttccagagaaatatgcagttctttagtggatcttaatttctgcagacattcattcactgcaatcttttttgcccacgcttcgaaaatatcgggattctgaagctggctcattttcgtgaaaatcttatagaagctgtccgccagaacttcttcgatatcttcatcgtttttcagataccgcttgcaaacggtgtacagttttcccgccatcatttcgtagactttccgctgcgcgttgcggtcgttccgctgacattccaataatagctctctttccataatcaggctttatatctacatagatgcataaaatttcaaaaaggttggaaacatggtcaacttttttgaaaaaataatgaattttagtgaaggcggcaaatgaatttaagaacgaaaacatctgtaaatgaattctatacttcatatttttgaaatattttcttttttgatttttctaaaaattgttttcaccaagtttatgatgccgcaattgtctgaatgtattggaaaaactgtggtcagatgttttcaggatgacaaattttaatagtgtttacaaatgttgaaatgaaggacttctgccttagccgcgatgttctatgttaatacgcaaattaatcaggttaaaattttaaagtttttttgataatctggttgataaggcattttgttttttaccacaccgaaacagatccttaaaagcttgtnnnnnnnnnnnnnnnnnnnnnnnnnnnnnnnnnnnnnnnnnnnnnnnnnnnnnnnnnnnnnnnnnnnnnnnnnnnnnnnnnnnnnnnnnnnnnnnnnnnnatcaatagattttcgtcaaaaagcatatctttgtttttcatgaggtgttttagtatttgttcaattctaaaatattaattttagacattaagcacctcatgtttttctccgaattcacgttataattaactgttgttctctattctacaaaaagaataggaaaatgttttaacctgaaattattatgtaatatatatagggtgaaaagtctctcggataaaaaacctatgactcttctttgataaggatcatcgctaaaggttattttttgctctgtttcaaatagaatcgtaaaaagccaattgcagtaatcgttcataagctcatatcttgtaataaacatatttcctatgtaaaaattactgccattttcaaggtgttttgtgatacttacagcataatctggaaattttttccgaataatatccatacaaatatcccaatcttccgggttatgattatgtttataatcattttcaagagaagttataattccgttaatactgcatatcgcaggacgtggaaccagaaaatcatatttttttaaatgttttattatatttttttctgttttttttgtatcaagaagtttatttaatctggaatcattcttttgtacagactcaagaatgttttgtgattcttttttaaacaacttttttttgtaattgatatccaagtatcttcggtaatgcattaatccgaaaatagccggacttttaagatttttccaagcccaatataatgctgttaattcattgaatgtataatttttctcagaaatattatctaatgtgctatctgataaatacgttgggtcaatggtataatcatttactttagcatttacctgaatgggtaagaatatttcgttattaagtaacgctttttctttatgagtggcaacgattattttagtattcattgaattcctttttaactttggttaaagctgagcctacaatctggtgcatatcatagtaacggaattccgcaagacgtcctccaaaaattacattttctgtatttttagctaaagctttatatttttcaaatttttgttgattttcctcattgttgataggataataagcttcctttcctatggtccaatgatctggaaattctcttgttattacagttttttcttgatttccaaattcaaaatgcttgtgttcaataattctcgtgaaagggtattctgcgtcattatagttgattactgcatttccctgaaaattttcggtatcaatactttcatgctcaaatcttaaagatctgtattctaaagctccaaattgatactcaaaaaactcatcgatttgtcctgtaaatacaattttatttgcaagaccttcgtaataatcgcgattatcaaaaaaattcgcttctgttcttacttcaatgtcttttaataaattatcaattattacattatacccgccaataggaattccctgatatttatcattaaagtagttattattgaaggtaaatcttacaggaagcctttttatgataaagcttggaagttccgaagcttttcttccccattgtttttcggtatactctttaatcagaatgtcataaatatcttttcctaccaaagaaattgcctgctcttctaaattcttaggatcttcttttccgtataattttctttggctattaattattttcagagcttcagaaggagttttagttccccaaagttgataaaaggtattcatattaaacggaaggttataatacttacctttggcaaaggctattggagaatttatatagttgttaaattcagcaaactgatttacataatcccatatttccttatcatttgtatgaaaaatatgcgctccgtatttatggatattaataccgtttatattttcacaatagatattgcctcctttatgattacgtttatcaataatcagacattttttatttcttttccgggcttcataagcaaatatacttccgaaaagacctgctcctactattaaataatcatatttcatttattgcgaatatttcatttatttttttttggaatataatcttttcttgtaaaaggtcatgtttataatccgcaaaatcttttattttagaatcgtaattagcaatacagtcttttattttttcaataatcaaagggatattttcctcagtcttatcaaaatgatattcatctttgatggggacatcctgtttaaaaaaggcggagccctccttacctataataagacagcaatctaataagcatgcctctctgggcattttttctcgtcctggatgatggccaaaatctacatataccttagcggatatcatgcagtctgcaacttcatccagtgtcatattaatcattggaagccaattgatttctggagttagttttcttattttatcaagaaaatctttatttttaacagcattatatgtaacaatatcttttttctgggaaacatagcttttgcctgtaaggaacatatcttccatatacccagaaattttgcctattgtttctattttatttttttgtaaaaaatcgactgaaaaatatgaatgggctaaatgattaatctttgcttttttaatatttttaattgtcggcagctttattcttcctaataatctgtgttttagttttggcggattttctttgaaattttcttcccaggctttaagtgaagtgaaaaaattagaaacgcttagccaccagattattttttgaatttttgaatattttttttcccagataaatatagaaaaggtttctgggaatatcatgatgttttgtctggaattttctatagaaaatgtatagggaatttgatagtgttcatattccttgtgtataggagaagaatttttttctgcatcgtaattcagataatgcatgaaaactttcttcccgctttgcattaatgccaatgccatctgatgaagatcttccggtcctccacttgcatagtttgccgggcagactatataaaaaatactattattagatatttttatcatgttaagattgtaggtttattggtaaatacggatggatatccaagacatatttcagccaatttgtaaaactgtatttctctataatttctttaggtagatcaacatagggagtggatataaaagattcaagaccatcaatattatcatcttcaatcacaaaaatattatttgaattataaaaatcatatttttttactaaaggattatttgtgattaatttttttccgtacccgatcgcttcgaaagttctcatagaaataccataatggatatcattggcaaaatcgagaatgacttcggattgagacacattaataacattatctttaaagagcataggcttatcaattattgttatcggctcgttaacaaatttttttgccttttccttagaattgatatttaaatttatggaggttttaagcttcatatcctgaaactttctggcaagttttataagtaaatcaattcgatttctcatataagtccctacaaaataaacatcaaattttttatcccttaatttaatatcatcgaaataaaaattagtgagaggaagaagtctggtattcttttcaagatcattaacatcaaatacaaaaaagcggtcaaaagagtctattctttcatacaccaaagggaatctgtctaagccgtcccattgataagcagaaattaaattcgctcttttctttacttcagatataagctcagaactaaaaagatcaggtctgattaccaaagcataatcatatgattttaaattgtaattattaagagttaatatttgtctctctaatttccgttcagctttttttctgtttttaaaagttttatcacctaaaaatatctttttataagcatggatgattgtattaagaatgcctatttttacttttacagtatcaggaattactaatacattaaatccaagcgcttctaaattatctttaaatctttcaggaagaccaaaatgatcgggaactgcaattattatagatttacctgaaaatttttttttcatcatatcattatatttcaacattaaattctttaaaaatttctctccaaaaacttttttctttcgtccacctgtgacatccaaaaggaagttttccgtgatttattttcaaggctttttcctgtttgttttctatagagaacctacatgcctgtttataatgaggttttaaaaaattaatgccgtttctttgaggttctatactgaaaaatacatcttccgcataaaatttacctgaatgtttaggatctaaataaatcttaaccacgttaggtattttttcaagtacctccaaaaactttgcacgttttcgtaaagaaagccctccgtttccgacttcattgtataataacgacttatctttctgaaattttcccttctttttataattaattactgatttggtgttgaccaaaattctctctacgactaattttacaattggtatcttctcagaacttctgatccagggagcgccaatataatcaaaatctttattacaccaatccagaagctcgtctttaaacacgaaacagtcggtctgataaatcagtaaatatttttccgaaaagctgttgtagaaatctacactcagcataagacaattgtatccgtggatatttttaaaataaacatcatcaaaagccaaaaatctggatgtgaacttttcatagttgctcacatccaaacttttgggatgaataaacgtaattttgtgattttttaaaacatggaatgcctgatttatcgaaatcagatcatctgcatcaggtgtttttttgtatatcggaataataatttctaccaaaacaggtctattctaaaatagttttctcaataatcttcacgcaatccagcaattgctcttctgtaatcaccaaaggcggagccaaacggataatatttccgtgggtaggctttgcaagcagtccgttttcttttaacttcagacaaagattccatgccgtggaactttcaggagtgtcgttaattaaaatagcattcagcaacccttttcctctaacttttgtgataaggtctgttttttcaataattttttcaacttcggaacggaataattttcccagttcttccgctctttcagaaagcttttcttcttctacaacatctaaagctgcaacagctactgcacacgcaatcggatttcctccgaacgtagaaccatgttgtcccggtttaatcacattcatgatctcattgtccgccaaaactgctgaaacggggtacattccgccggaaagggcttttcctaaaattaaaatatcaggttgtacatcttcgtgatgacaggcgattaattttcctgttcttgcaattcctgtctgaacttcatcggcaataaaaagaacattatgctttttacacaattcagaagcattttttaaaaatccttcattcggaacatatactccggcttcaccctgaataggctcaaccagaaatgccgcaatattttctgcttctctgtttaaaacttcttctaaagcttcaaggtcgttgtaaggaattttaataaaacctggagtaaacggaccgtaattctggttcgcatcaggatcattggagaacgaaacaattgttgtggttcttccgtggaaattattttcacaaactacgatttttgcagcattttcagaaattccttttacttcgtagctccattttcttgctaattttaccgccgtttccactgcttcagcaccggaattcatcggtaaaactttatcaaaaccaaatagggtagtgatctttttttcgtattcccccaatttcgaattgtaaaaagctcttgacgttaaagccagtttctgagcctgctcaaccaatgctcctacaattttaggatgagaatgaccttggttcacagcagaatacgcagaaaggaaatcgtagtatttctttccttccacatcccagacaaaaacaccttctcccttatctaaaacaaccggaagagggtggtagttgtgggctccgtgtcggtcttcaagatcaatgaaatattgtgagtcttttactgtttctactgttgacataaatttaggttttgtacaaatttaaacattataattgatatgaataaacagaaatcttctactgaaaaatttcgtgggaaaagtacaatttaatgatagaacagaatgttttagaaattattattccaatcacttatcaattacagtttaaatatctttttgttttgattttaataaaaaaccgccccaaaaatgaggcggttcaaatattttaaataatcaatcttagtgattatcatattttctgtccatcacaaaatcctccatgaattttgtagtatagtttcctgaaaggtaatcctcattatccatcagttgtctgtggaaaggaattgttgtttttacaccttcaatataaaattcctccagtgctcttctcatttttgcaatcgcttcttcacgcgtctgagccgttgtgattaattttgcaatcatagaatcgtaattagaaggaattgtatatcctgaataaacgtgcgtatccactcttactccgtgtcctccgggaatatttaatcctgtgattttccccggagaaggtctgaaatccatgtaaggatcttccgcattaattctgcactcaattgaatgcaatttcggataataattgattcctgaaatcggagttcctgcagccagaagaatctgttctctgattaaatcataatcaataacctgttcagtaataggatgctctacctgaattcttgtattcatttccatgaaatagaaatttctgtgcttgtctacaaggaattcgatagttcccaccccttcatatccaataaattctgcagcttttacagcagcttctcccattttttcacgaagttcgtccgtcatgaaaggagaaggggtttcttccgtaagtttctgatttcttctctgaaccgaacagtctctttcagaaaggtgacaagctttaccaaactggtctcccgcaacctgaatttcgatatgtcttggctcttcgatcagtttttccatgtacattccaccatttccgaatgccgctacagcttcctgaattgcagattcccagtgatctttaaggtcttcggctttccaaacggctctcattccttttccgccacctcctgcagttgctttgatcatcaccggataaccaatttcctcagcagttgttgcagcgatttcataagactcgatcaaaccgtctgaacccggtacgcaaggtacacctgctgctttcatggttgccttagcatttgctttgtctcccattttttcaatttgctcaggagtcgcaccgatgaatttaataccattcttttgacagattctggagaagttagcgttttcagataagaaaccgtaacctgggtgaatagcgtctgcattggtaatttccgcagcagcaataatattaggaatttttagataggaatctttgctcattgcaggacctatacaaaccgcttcatcagcaaatcttacgtgaagactgtctttatctgcagttgaatataccgcaacggtcttaattcccatttctttacaagtacgtaaaatacgcattgcaatttcgccacgattggctattaatatttttttgaacatctctccgaaattttaaattataaattttgaattttaaattattttaaatgaaaagcttcatctaaaatttataatctttaatctaaaattccttaagatggatctactaagaataaaggttggtcgtactctacaggagttgcatcgtctactaaaattttaacgatttttccgcttacctcagattcgatctggttgaataacttcattgcctcgataacgcaaactacttttccgttagaaacctcatcaccaacatttacgaacacgtctttgtctggagatggctttctgtagaaagttccgatcattggagacttaatggtcacgtatttgctgtcgtcagaagcagcttctgtacttgcagcaggtgcagcagccggagttgcagccggtgcaggagccgccgctacctgttgtggagcagtgtggtaaaccgcaggttgagtgtaagcaacttcacttccagccaatggagttttaatagtgatttcgaaatctttagttttgtactttacttcagaaacttctgccttagatacaaacttaataagattttgtatgtctttaatgtccataaaattgatatttgattttgttccaaagataccaaaaaaacataaaaaacaacaaaaaaccgccaaattttatcaaaattgggcggtttttgtattaaaatgagtgtttttcgaggaaaaatcgactcttagttttcttcagtagatgctacttctttttccaatactactttacctctgtagtaaagttttccttcatgccaatgagctctgtggtataggtgaagctctcctgttgttgcatctttagctaattgaggaactacagctttgtagtgagttcttctcttatctcttcttgtagacgattgtcttctctttggatgtgccattttgtaataacttttttaattgatgagcgatgagattcatcatctcatcattaaactatttaatttttattctttaaattttttagtgcgtcccatctcgggtcgctttcatgttcttcctcttcttcttcctgaatttctttcgggctgaacttttccagaatagcaagatcatcatcacttacattcggggaaatctttttcatcggaatggaaagtgctacgttttcgtaaatcagttgtgcgatattaaacgcatgatctgaggtcgggatcgtgattacatcttcttcactgtcatcatactcttccccgaattttaccaaaactttgatctggttttcaataggatgatcgaaattttcattcgaaatatcacaaaccagttctaccgttccgtttactttgatctcaaattctaaaaaagtagaatgcttatctaataagacatccaccgcaattttaggatttgtaaattcctgttcagtgtcaaataattgaaagaactctttatctatctcaaacctgaactcatgcttgccggtttttaacccggaaaagcttacgtcatagtttcttaacttgtccataaaatgagtgtgcaaaaatatgcaatttttttataataacaaataaaatttctaacaaattaatttaaaatctttattaaagatttatccttcagtttcatccggcagatcttcgtctattccgttgtctactgccatttttcttggctgcagacgattgttcatcagatcgttgtattccgttctgttcctgaaaattttaatagcagtgaaaatcgcttctgtaaaactctgtggatcggcaacattttttccggcaatgtcataagccgttccgtgatccggagatgttctgatgaatggaagtcctgccgtataatttacgccttcttcatacgccagagttttgaacggagccagtccctgatcgtgatacatggctaaaactgcatcgaaactcttatattttccgggctggaaaaaactgtctgccggaaaaggcccgaaagccagaactccattatcggaaagttctttgattgccggagcaataacttcaatttcttcttttccgattactccgccgtctcctgcgtgagggtttaagcccagaacagcaattttaggtcgggtaatattaaaatcttcaattaaagtctggtttaaaactcggatctgttttttaattttttccttggaaatattctccgcaacctgtgcaatcggaatatgatgtgttgaaaccgccaccttcagatcttctgtcactaagaacatcaatccttttttattgaatttctcttcaaaatatcctgtgtggccagcgtgtttaaagcccattttcaccatttcatctttgttgatcggtgccgtaaccaaaacatcgatttcccctttcagtaaagcttcggtagccgcttcgagagaatcgatcgccattttggtggattcttcagtaggtgttcccagttctaccattgaattttctttcaccagattcaccatgttcagttttgctgcctgagcctgcgaagcttcggtgatgtagttaaaatttaaatttaacttaaaaatatttttctgataggtaaataattttcccgaaccaaaaattacaggtgtgaaaaaatccgtaatggttttgtctgcaagagatttcatgatgatttcgggaccgatgccgttgaaatctccaattgaaattcctactcgtactttatggttttttgggctcattttgattatctttgaacattataattttacaaatttagcaaaaaataatatgttcacaggaattattgaagcagttggagtaattgagaagatcgaagaaaacggaagcaatatagattttaccttaacatgcccgtttaccaatgaattgaaaatcgaccagagtcttgcacacaacggttgttgtcttaccgttataaaaatcgaaggagaccgttatgtggtaaccgccatcaatgaaactttagaaaaaacaaatcttggaaaatggcaggagggaaccgtggtgaatcttgagcgttgcatgaaaatggacggaagactggacgggcatattgttcagggacacgtagataaaaccggagaagtagtgaatattgagaataaagacggaagttattttatcacgatgaagtatgaagataatggtagttttgtaaccgttccgcagggctcaattacagtaaacggaataagtttaaccgttgcaaaaagcgaagatacacagttttctgtagcaatcattccttatacgtgggaattcacaaatatgaaatatttaaaaattggagataaagttaatctggaatttgatataattggtaagtatattgctaggttaattaaaaaatagcggatgtcaattaatatgtataaaggatatagcttaaggaaccgtgtgttcttcggtttcttattggtttgtcttttaagtgttgtcgcttcttcgctggttccatactttgttttaaaggaaaattacgaaaaacaaagtgaaattgacatgcagaataagacgggtactgtaattagttacctggattatgagctgagcaggacgcgtgtaaaaacgagcgatcttcctgaacttctggataataaaatatatgaaatagccgatattaacaaacatcctgttgttgtttatgatttaaagggaaattaccttctttccagtgtggaaggaaattcggagtataaaaaacctgttcctttaaatattctcaaccgtattttggcaaccaaagcaagggtggatatcaaagggtatgattccgccaaggatgcagttcttacgtcctcatatttattactgaaaaataatgatttagaacctatagggatcgtatacattccgctttatcatgatgaagctgcatattttgatgtcttaaatgtttatgtaaagtatattgttcttgtagatgttttattgattttattcagcgtctggtttagctgggtgatgtctaataatttagcaaaaaatattaccaaattctcggatatgattacgcgcatcacattgtttgaaaatgaaatgcgcccgatccgttactataaaaatgacgaactgaatgctttggcgagagcgtataaccgcatgattctccagattcaggatcagaaggaaagacttcgttttaaagcttcggaagaagcgtggagagaaatggcaaaacaggtggcgcatgaggtgaaaaatcctttaacaccgatgaaactgaccattcagaattttgaaagaaaatttgatcccgaagatcctaatatcagagaaagagtaaagcagatgagcaaaaccatggtcgatcagatcgatttgattgctaccgttgcttctgcattctcggaatttgccaaattgcctgaaaaaaacaatgagatcatcaatctgaacactgaggttgaagatattctccgtgtttttaatgatgacagcatcttcatgcattccaataaaagcaatattatgatcaatatggacaggatctatttgtccagaatcattaccaatcttgtaacaaatgcaagacaggcggaaagtgatgaaagaaaattaatcatcaatgtagatctggaacagcatcagagacatgtaatgatctctgttcaggataacggaatcggaattcctgaaaatatttacgaaaggatttttgaaccgaatttcacttcaaaaaacagcggaatgggacttggtctttccatggtaagaaaaatggtggaagattataaaggagaaattaccgtaaaatccgaagtcggaaaaggatcaacatttaccatcacattaccgacaaatttatagtgaagccttttacattcagacaatttgaaattcagcagtctaaaaacgtctttcgcgtaggaacagacggtgttttgctgggtgctttagcttgtgttgataacgcttctaaagtactggaagtcggaacaggaaccggattaatttcgatgatgttggcgcagagaaatcagaaggcgcaatttttgggaattgacatcaatgaagaagcagcacatctcaccaaacttaattttgaaaattcaccttttgcttcacgattaaaaaatattcatcagaactttaaatatttcgaatccgaagaaaaatttgatctcattgtttccaatccgccatattttgaagcttccggctctgaaaaagataaaattgcaaggcagaccgtggaattaaatttccgacagctcatttcaaaatcatcttctttactaacggaaaaaggaatattttcagtcattattcctgttgaagccggaaatgattttattcagattgcaagtgaaaatcagttgtttttagttaaaaaaatcaatattaaaggcattgaaaactcaaaaacaaaaagattgattcttgaattttctttaaaagagcgatcttatgaagaactcgaatttaccatagaaaaaagtccgagacaatactcggaccaatatcttgaactcaccaaagagtttcatgttttcaaaaataagaacattataaaccattaagcaattgttaaggaattaagaatattaagtactgttccactttaaaagaaacttaacttcttaaatgtctttaatggttaaattttactcaaataattccgctgtatcaagtacggaaacttttccgtcttcacatcttatggcttcacccggaaaattctggatcatatgataatcgtgtgttgccataacaacagccgctccgttttcaagcgcaacctgctttagtaaagtcatgatttcattggacgtttcagggtcaaggtttcctgtaggctcatccgcaagaataagatccggatgattgagaagcgctctcgcgatagcaacacgctgttgttctcctcctgaaagttcgtgcggcattttgtgcttcttacttttcatgtttacactgccaagaacttcgttaatgcggtcttccatttttgtcttatcgctccatcctgttgcttcgagtacgaatttcaggtttttttcaaccgttctgtcagaaagcaactggaaatcctgaaaaacaattcctaattttcttctcaggttcggaacatcggaagctctcagtttggcaaggtcgaaacctaccactgcgccgtgtccggaagccaaaggaatatgcccgtacaaagttttcagcagggaactttttccggaacctgttttcccgataagatagcagaatcttccttttttgatgttcagattcacatcagaaagaaccgtgaagtttttttgggcaatcttcgcgtgctgtaagctgatgatattgtctccggcgatatttgtatgtggcataattcagttttaaagtactttgtcttaaaattttttcagattttaaaaataggaaaaagaagaataaataacctaaattttgggaaaatttaacaacaaaaaatgcctgaaaaactacttttcaagcatgatttgtatatgataataaaaagattatctcttagcgcgtgaagcacttacagttaaactctttctgcctttagctcttctcgcagccaaaactcttcttccatttggcgtagacattctttctctgaaaccgtgtttgtttcttctttttctttctgatggctggaatgttcttttactcattactatatgtttaaatcgtaattatctattaattttcaggttgcaaatatatggaattttttaaaagttgcaaactttacaaatctttttttaaaaaaattacactgttttttcatgcattctttgcaaatgccgacaggatgcgtactttcccgatattcaaaaataatgcacaatgatttgtttaaaagctctatctttggaaactcaaatttaaagaaaaaataaacatcatgatgtttacaccagcagaacttttagaaatcaacaagttacttactccggaacataaaattgtaattcttacccattataatccggatggcgatgctattggttccagccttggtttaaaacattatctgaaagcaaaaggtattcatgcagaggtaatcgttcccaacgattttcctaagtttctgaaatggatgccggaagcaaaaaaagtgctgatcgcagactacaaaagaaaagtagcttctgatcttatctatgacgcagatgttattttctgtctggatttcaatgcgccttccagaatcgggattttgggagactggcttaccaattccagagcgaaaaagattcttatcgatcatcatcagcagcctgaaaagttcgattttgtttattccgataccgtaattcccgcgacttgtcagatggtttatcatttcatagaagcgatgaatgatgaaaatcttgtgaataatgatattgcagaatgtctttataccggaattatgacggatacaggaggtttcagattccgttctacaagtgcaaccacgcacagaattattgccaatcttatcgaacatggagcagatcctgcgatgattacttccaatacatgggataccaataccgtttcccgtcttcatttattagctctgattttaggaagaatagaagtggtaaaagacggaaaagtggctgttctttatttaacaagggaagagctgaaggagtatggcttccagaaaggcgatacggaaggttttgttaattacggactgagtattttaggcgtaaaaatggcagcattctttatggaagatctgtatgaagattttattaaaatttctttcagaagtaaggatgatatggatgtgaatcagttctcaagaaaatatttcaatgggggaggtcacatcaatgcagccggaggaaaatcttacgaatctttgcagggaactattgaaacattcaaagtgaaaatagaaggagaggagagtttgtaagtttaggataagattgaggttcagtttaaggatgagaaagctgcgtatttcttattcagaacaaaatgaagtggagtgaagaatgtaaatttatttattttatcatctttaaattcctgaaaaataatcaacgcagaatttaatttttcttttgaagagatggcttcttcgcttctgaactacgtttttgcagatcttcagtctgttcgcaataaaactcattcacattctaaaaactctcaacgctataactctaagactctaaaaccctaaaaccctcaactctaacccctcgaatatcctttttcctcaagctctttacaggtgtattcataaacttcctgaaacataatatctaagaattttttgttgaaaagactgaatttcgtcatttttggcggatccagaaaaatatcacaggtcttagctttggaatacacggattttgcgatcgccaaatgtaaaatccggtcaaattctttcattaagctcattctttccagactgtcgtagctgatggaattcacgtgggaagcaatcaggaaatcgcatttgtctacaattggttcaatcggaagattgtctaaaacaccgccgtctacataaattttttcgccaatttttaccggaggcaaaacaaaaggaacgctcgaagaagccaataacgggatgaaaagttcaccttccgagaaaaaatctacaattccgtgcgtcatttcagtggcggcaacatacaaaggaatttttaaaatgttaaaatcatcctcaggaaaatgatcggtgaagagtttcagaataaatttcgagctgaaaattccgtttttggaaagtttaagataagacctcgaaaaaaaagtagtctgctttacgatttccatcatttcatccggagatttcccgaaagaataaaacgctcctacaatagatcctgcactggttcctgaaataatatccggtttcagatcgtactcttccaaagctttcagaaccgcaatatgagcaattccgcgcattcctccgcctgaaagagtcagaccgatgacgggtttcttttttttgaaagagaaaaaatccagcatactaaaagaccaaatgtttcggcatattgtgaagaagctccgtattgatgatctctgcgcagatttttggcttttcccaatgtccgttgtgtccgcaatcgagaatgtaggatttaatgttggagcggtcgggaatatgcttaatcatggtttcggtttttaccgcgttgtcatgttttccggcaagaaccaaaatttttgcctcaagattttccatgatatgctttttgtccgttcgttccaccattccttttacagatgccaaagctccgagattatgggtagaaagggcaacttccagtgcggtttctatttttccttccagaatgtctttttcgttcggattgaacagatttggaactcctgctcttgcataatgcgcgaaagcatctttgatgatgcggtaacttttgatgcgctgttcttttttttcagcatcatccggaaaatacgtggagaaaaataaagttaaacttttcaggtattcagggtatttttctgcgaaagccagagaaatgtaacctcccatcgaatgtccgagtaagtggattttggttatattttcatgatctaaaactttttttacctcttccgccatcagttccatcgtctgaacttccgcaatgatttcagattgtccatgaccgggaagatcaatttttaacaatgaaaaattgtcggaaagatgaggttccatatcgctccagatagaaagattttccatgaagccgtgaagcagaaccaaagtttcttttccgtttccttttctctcgaagtttaacatatttcagtaattaaaagtggatatcaatatattcaacaaatcccgaaccatttaccatatcctgaagtcggtatgtttttccgccgtctttagacaggaaggtttttgttccttttctggtataaggttttccgttgtcgtttgctgaaatactttctgtaatttctcctgtaaaattcatgtgtttgtctgaaacaaccgccataaatccttttatttcgacggtgttttttccggagctgatatttcctgaaacgtcgtaatggtctctttcgccatcaatttttttgaaatttacagaacccgaatttttaattgaattatgggtgaatttatgagacccgctaaaatctttaaaatgatttttagattttatgctgtcgttgatttttgttctcgccgcgttaatagaatcgatgatttttgtactgtcggtcttatcggaagcagaagttgcttcttttttggagcatgaaaaagcaaaagcggctaaaacaactgcggttaaaaagtttttcattaatgaataaattatactcaaaagtaaataaaaaaaagagcattttaaaaatgcccttcttattttatttgattaattcttcgtaaactttcttttcccaaggtttaatgtcggtaactccgtatcgttctttcttcgaaatagcaatgttatccagaacatctacaaagtttttatagtttgcgtcatctgtaggttccacgataatggtgaaattttccttgtttggagcgttattgtaggcttcagaaataattttagtgatattaattccgctaaaatttgtttcttttaaattacttgtatttaatgcttctttaaagctttgatgataaaatactctgttatcttttcctaaaataaaggtaacctgatttaaaggttttattacgggtatgtgcgttgggtctggatgtggatccttcgcaggcaatcctaaatccatcacattgggtttagtgaaattcgtggtaaacataaaaaaggtgatgagtaaaaatcctaagtctaccattggagtcatgtcaacacggatcagtttttttctttgtttgcttcctccctgcttctcttgtgcaataacttcagccataattaatagtttttaaaatgttaaacagttttcaataaagggtgttgtatctttatttttgttttggaatcaatgcaaagtttatacctaaaatttaaaaatggtattaatttaacattttcactgtgtatttttatttaaatcttttaaaatcaatatattaaaaaaataacggtttctaaagcttaagaatttattaagcaaaagtttctgctatcatttgctgaacgaagtgcccttgcgaaccaaaaataaaaagcatagctatattaaatcttgtgatcgttgcgtttaaatgaaattcaccaaattagattattttaaaacaaagtattaaaaaagcctcaccagaaaaactgataaggctgatttatgagaattgaatatattatttattctgtttataataatttacaccacattcaaggaattttttgaatttttctttctccatatatcctgaaaccggggtgttgattacttttccgtccggcgttaataaaacgtaatgcggctgggaattattattaaaattcacctgctggaaaagactccatcggtcaccgatggtttttacttttttcacctgtccgtcaccaagatcgatttttgttttctgatcttcaggaagttcttctttatcatccacataaagagaagccaaaacaacatcgttttgaagaatcggtaaaatatcaggttcgctccacacaaattcttccattttcctacagttttcacatccgtaacctgtgaaatcaattaagatcggtttgtcttcttttttcgctaattcaatagcggtaaagaaatcgtgttcaggatgcattcccagaattccgtctttttcgtcatggaaataactaacatttaacggaggtaaaattccgcttaacagttgcagttttggacgatcggaaggaattaacccctgaaccagatacaccacaaaaccaattcctaaaacccctaaaatttttctggtaacagaaattttcggtttcttgtcgtcatgcgggaatttgattaatccaaataaataaatggctaaaccaatcgctacaacgatccagattccgatgaaaagttctcttttaatgaagaacgttttagaaaccagatctgctttggataagaattttaaagcaagagccagttccacgaaacctaaaacaactttcaccgtattcatccagcctccagatttcggaagactttgcaatgcctgcggaaataaagccagcaaaccgaaaacaatcgcccaagccaaaccgaatccggccaaagcaaaagttagcagcatcggaacatttgcagaacctgtaatcgcgcttcccaataaacttcccaaaataggacctgtacaggagaaagaaacgataaccagcgttaaagccatgaagaaaattccgataattccccccgcttcttccgcttttgaagatttattggcaatagaacttggcaaagtaatatcataatagccgaagaaacttcccgcgaagaaaatgaatatgatgaaaaacgcaatattcagccagacattggttgaaatttcgttgaaaatatttcctgcaattccatcaattaaatggaaaggaacgctcagtaaaacaaagatcaaaagaatgaaaaatccatagatcaaagcatctctttttccttttgccggatttttatttcctttggtaaagaacgaaaccgttagaggaatcatcgggaaaacgcaaggcgtcagtaaggcgattaaacctccgataaatcctaacagaagataggtccagtagttttcgctgatttttgatgatcctgttccgcaatccgttaatggtttctggaaattaatggattctatttttaaatttttaggatcaagtttttgggtttctgcagttggaacagcagtttgaacaacattacccaacgtatccacaacaggctgtaaagaatcttttgccgttgttttttcatcggtttttacttcttcagccgcaccttttggcgtaacctgtttgttgaattccaatgtgttcggagcaagacagactctgtcgtcacaagtctgatacgtaatttcagcaacaacttctccaggttttgttccgtctttcagcttaaatttctgcttgaaacctgccgtgttggagtagaaaataatttttccgccgaaagcctcagaaaattcttcatgctttttacctacttcggtaaatttcccgatcagttctatgtttttccctgaaactttataatcggtaggaattcccgtatcttccggaatgtctttggagtaaatatgccaaccgctttccatggtggcattcaggacggcttcatattgattgtcgcctaattcgttgattgtaaatttaaattttacaggatttttgatttgtgcattaattcctgctgctaaaaacatcagaactaataaaaaccagtttttaaatttcatttttactttttattaaaattttgagaatattctgggtattctcattcttagaatttcttctgtcctgccggaaaggaacaattccgagtacggaatcttcgccatcggtaagaagccagattttttgccttgctaaaatagatattttttcgtctctaaaaaatttagaaactttctttttccccgaaaatcctgccggaaaaaattcgtcaccgtctttttgccttcttaaacgcagtgggaaacgtagtttttcggcatcgaactcccattcaaaactgttattgattgattcaatttcaatgatattttcgagattaacggtaatctggttttcagaaaagtcaaaattttccatcagaagaatttcatcattactgtgtttttcaaacttccattttccaccttccatttttttgcttaaaatcagctcattataatttacgatcagcagataatcttttgagaaaaaagaacttccgttttcagctttaaaaatttttggaatttcttcttcctgattaaaaccatactttttaaggatctcaaatttcacaaaatcactttcttcattcagtttgtctttggataaaactgtatattctctgttgaaaaccgaaatcctgttttcgatctcctgaatctgctgctggacaaaatctttggtttgatttaaataagaagagctttttttgaaattttccagaaaatgatcgttggtttccagaagtttcggaacaatttcgtttctaattttatttcttaaataatcatttttcttattagacagatcttcacggtattcaatattattttcttctgcgaattcgtagatttcttcttttgtgaaatttaaaagaggtcttaaaatgtgattgtcgtttgccggaattccgctaagaccattaattccggctgctttcgaaagattgatgatgaaagtttccagttggtcgttcagatgatgcgcggtaactaaaaattccagattttcttctctttgaacatttctgaaaaattcataccgcagttctcttgcccaaagctggatagaatgttccggtttcttgtctttttctgaaactttgtataaatgaaatttaatatggtttctctcacaaaaatccgccactgttttctgatccagatccgaatcttctccacgaagtttataattgatgtgggcaatctgaaaatgaatgcctaagtccttaaaacagtgtgctaaaaccatagaatctgcacctccgctcaccgcaagaagatagcttcggtttttgggggaatcaataatgtttttaagctgattttggaagttgtctacgttcagcatggatgtccggaatttcttttatgcaaagataattcatataattaaaatgaatttcgttacctttggttcgtctaaaaatgattatttatgaaaatttttaaaattttagcagtatctgcaatggtgttgggaatgacatcttgtatcagcaaaaagcagtatgatgcattgagctcaaattacaagcaatgtattgaaaacgtaggtgaaagacagagagaaattcaggaactgaagtctcagaattcagctttaacaagtgaaaataatttattgaaaagtcagcatgatgctttgaaatcttcattggatgcgtgtctttcgaattcagggaaaagctccgccaatatcgacaagctggttggagaaatcaattcttcaaactcttatatcaaacagcttatctcaagcaatgcgaaaaacgacagcttgaatttagcattatcaaacaaactgaaaagatcgttggataacgtagcagacagcgatgttcaggtaaaagtgctgaaaggagtggtaatgatctctctttcagacaaaatgttgtacaaaacaggagattacaacgtattacctgccgctcaggaagtgttaggaaaagtagctaaagtaattaacgattacgataaatattctgttcttatcgaaggaaatacagataacgctcctttaagctctccaaatttaccaaaagacaactgggatctttctgctttaagaggaactgcggttgctaaagttcttcagactcagtttggagtagatcctgcaagaattacagcaggtggacgttccgaatacaatcctaaagcgactaacatgagcgtttcaggaagggcggaaaacagaagaacggagatcatcattatgcctaaacttgatgagtttatgaaattaatggatatcgcgccaaagaaataatttacaatcaacattcagtcaatacaaaacaaatcccgaagcaattcgggatttgttgtttgtgattaatcaaattagttcttcttttttcagcaaagaaataattttttgaaaaaatgaattggatagttccggtttagtttttttagaaaaagaatccacagtgcttttacgcactgtagtcttctgatttctctggttaatttgtttttttcccgcaagcattatgtcgtgtgtttttacccttcaatgcaaagttaggcttattcgcagacgagaccatccgtatttttacggtaattaaactgggggattttcccatctttccggaatctttaggattgttcccgcttttttgttatatttaagtaaatttgaccgaaataaaatttgcagcatgagcttttttgaagaaaaacttccggaaatggacaggtaccttgaaacacacgcttcatcggaacctgaaattctgagaaaactgagaagggaaacataccaaaagaccacacagccacacatgatctccgggtatcagcagggaagattgttaaccatcatttcgcagatgatgcagccgaaaaatattctggaaatagggacttttacaggctatgcaacgctttgtctggcgaccggaatggcgaaagacggaaaaattactactttggatgtgaatgaagatttagcgtaccttccaaaaaagtattttgaggaaagcaaatacgcatctcagattcactttaagcttcaggatgcaaaagaatttttaagacaaaccgatgaggtttttgatctggttttcattgatgccgacaaagaaaattatgcagaatatttcagattaataaagccaagaacaaaatccggctcggtggtgatgtttgataatgttctctggtacggaaaagttctggaagaaaatccgaaacagaaatctacgcaggtcattaaggaactgaatgatttgatcgcaaaagatgatgattttgaaaatcttattttacctttgcgtgacgggctgaattttttacgcagaaagtaatttgaggttgagtttaaggttaagatttacagcgtattttctcaacctgaaccgaagtcttaaccttttaattagaaaaataaatggataaaggaatttgtgttgttacagtagctcctgttcgtgcagaaggttcggacagagcagaaattgttacggaaatattgtttggggaaagtgcagatattctggaagtgaataagaactggaccagaataaaaatgcattatgacggctatgaaggatggatggatacgaagcagttgaaacctgtaacagacgaatatctggctaaacggaaagtaaccgtcgtaaccgaagacttttcttctgtcttgatgaatgacggaaaaacacttctttccatggggtcggaagttgaatttcctgcggttgcgtcgagaagaagtcacgacgtgcgagaaagtattgctttaacggcaaaagaattcctgaatgtgccgtatttatggggcggtaaaagcttttttgcggtagactgctcaggttttacacagttggtttacaaaattcacgacataaaattaccgagagacgcttcacagcaggttgaggtgggagaatcattaagctttgttgaagaaagtcagccgggagatcttgcgttttttgaaaatccggaaggaaaaatcatccacgtcggaatcatgctggataaccagagaattattcacgcttccggaaaagtgcgaatcgacacgctggattctacaggaatttttaacaaagaaatgaataaacatacccataagctaagagtaattaaaagtttgctttaacttaaaatctgtctgaaatggaaaatattctctttgcagtttttgatatttttaattttggattactggtttttctgtggtggtttacggtgaaacattataaatcgcttcctcagattatacccattcattttgattttgacggaaaagcggataatttcgggagtaagaaatatgcctttttaatgcctgtcgttttaaccggactttatttcttatttgcttttattgtgagagatccggaatctgccaattatcctgttaaaattactgaagaaaatcaggatgctcagttcatgatcatggaaatttttatcagatggctgtttatgataatcacattgctatttttaaacagtcaggattatatgttccggtattcttttgatgaaaatgtaaaaccaagagtcccgatgtcttcggcaattttttcggtgattggaagtttaattattttgttcgtttttgtaggtattttcaaatgataaaatctaaaaataattctgaacattatatctggggagacaactgcgatagctggattctgaaaaatgatgcccatttatccgtcaagcaggaaattatgccttccggaacttcagaaaaactgcattttcatcatctcgcagaacagtttttttatattttaaaagggaaagctgtcttttttattgatggcgaaaggttgtctgtaaaaaacggcgaaagcattatcattcccccaaaatctaaacattatattgctaatgaatctgacgaagatttggaatttttagtcatttccagtccttcgactgataacgacagaacgcaagtttaaaattcatacatatggctttcttttacaacatatttatccatctgctcatcttcgggatgaaggtttttgcgttatttaatgacaaaactaaaaaaggcgttgaaggcagaaaagaatctttaggaaaggtgaagtcaggctttaaaaaatctgataaagtgatctggatgcacgcttcaagtcttggagaatatgaacagggactgcctgttttggagcaactgaaagaaaggtttgcggatcataaaattttagttaccttcttttctccatccggttatgaaaacgtggtgaaaaagaaacatattgccgatgtgatctgttatcttccttttgataaaaaatctgctgtaaaagaatttacagaccagtttgatgttcaactattttttacggtgaagtatgattactggtatcatcttcttgatgaacttaaaaataaaggcgcaaaaacgtatgtgatttcagctttgttctatgatcgtcagtcattttttacatcgtatggaaaatggtttgtacagcagcttcagaaaaatatcgactggttttttcatcagacccaaatgtcctttgctctggctaaaagcattggattaacgaaatcttcggtaacaggagatacgagatttgaccgtgtaaaacagttgagacatcgagacaatctcgtagattggattaaagattttattggcgaagataaaacggtggttttcggaagttcttggcaggcggaagaaaaaattgcgctggaagtttcgcagggaagtccgtatgcaaaactgattattgctccgcacgatctgaagagggtttctcatttgaaacagctttttccggaagcaattttatacagtgagattaattctggcgaaaattttaactcgaaaattttaattatcgacagcattggtctgctttcaaagctctattcttacgcggatattgcagtcgtgggcggaggttttcatgatgcgggacttcacaatattctggaagcggcaacctttggtgttccggtaattttcggaaatcagtacagaaaaaatcctgaagcagacggtcttatttcggcggatggaggaagatcttttgaaaatgcaggtcttgctgcagattttgttctgtttttaattaataatgaagattctcttcaggcaatgtctgaaaatgctgaaaaatttgtctctgaaaaacccaattctacggaactgatcttacagaaaatcttatcgtaaaaatccctgatttttaatatctttgatgatctggtcaaaattttccggaatcttatcgctggtcagccagttaaaatcgatcccgttgttaaggaaaagtttggataaatatgtattctcaaggattttatcttttaaattatccagatgctcatcaatttccatccagtaatcgacatccagttttttggttaaaagcaaagctttcaccactttattaatgatgtagagatacagtttataaacattatcgaatctttgtcggctcagatcttcattgtattctaaaatctcattaatcaacaataaattaagagaaacttctccgaatttatcggtcgttacttttacgtgttcagtaatttcactgcttattttgcggataattccaaggaaatatttctgattgctgatgtattttgatgccagtaaaactttttcggaaacaatttcctccatcgcatctcttttattgtctgtggtttcaggatcaataagttcgaagtatagttttttagataaaagtttatctttttttaataatctgaaaatcaggcggtctttttctacagaagaaaaattgctcagagcggttttgaactcttttgaatattccattcaataaaattaattaaaaattttcgaatatttcaaaaatccgttgaatgcccagtttgcggtatagtataaagatttaaccgtagaaaatcccatgaagtctttgtacaccagatattgatctctgatgatgttttttttctttctggaaacactgttttcgcgcatcctgtatttagcgagtgttttattcagcggatagcctttcgggatttttttcagaagattcagccacattacatgatcttcgcgtttgctttttacaggaaagaaaaatttacccactcttttggtgtcgtacatggtagaaaccggagccagtctgcaggttttaagcaggttggaaaaggtaacgattgtatcggcttcaaaatcttttagaaccggttccatcgtatgttcatcacatctggaataattgcagtacaccaattctgcattgtttttatccataaacccgatcatctcttcaagatattcaggataccagaaatcatcggaatccagaaaggcgatgtaacgaccttccgctctttcgaggcttttatttcgggcatttcctgcgccgccgtttttttcaagaacgtgtaattttattctgggatcattatacttttggataagttctacggtgttgtcttgggaacgatcatccgagatcagccattcccagttttcatacgtctggctgagtacagactttatggtttcctctataaattccgccgaattgtaggagggggttattatcgaaactaattctttcatctgttgtgttttataaaaattttttctcgtaaaaatgccaggaactgattcctaccgcaataaccaccatcatgcatgcaaaagccatcacgtaaggattataatctttaaacaatcccaatgtggtaaaagttctgatgatcgggaaatggaagatataaattccgtaggtaaaatctccatattttccaaaattatttaaaaacttaaaggaatatgcgatgtacaggacgataatcccgatcatcattggagaaaaaagctgaatatctgtaaataaatcgatccacactgtggctatggcaatgataaaaagggtgtttttatatttgatgaatttgtcgaaattaaaataaatcagcattcccggtatgaaataagacagcgttcccggaagctgtttcgccattgaaatttttccctgatattcaaaataattaagataaacaagcgacataaaatacaggatcattaaactgatgttcctatacttgttgttttttccgaacagtaaaaacatcagcggaacagcaaaataatagcacatttctatctttagtgtccaaagtgctccgttgactgcctgatttccgaaaactcctggaagccacggtgctttaaaatttaaaaaaatggaattccagaaaagatatttgtagacctgcgtattactaaaatattccctgaacgaataagtgcttacaagactgagtaaaatggcacagagaaaaacaaccaataaataagcgggaacaattctcctgattcttttgcttacatagcttttaagactggaagaacgctcatagcttctggcgatgagaaatccgctcaccacaaaaaatccgaaaacagcaacttcgatagggctgtgttccagaaatttcagctccggagaaacgcttaaagctccaagatgtcctaagaaaacgatgaaagcgaggagaacacggataaaatcaaaattatttttcgtaaggtcttgcatttgcatttgtttgttacaaaaatagtttttttcgcagaaaagatcatatttactgtaatgaatgtttgctgaataaaggaaaaacaacgcttttgaaatgccgatacacagaaaataataaattttaacaatatttttttaaaaaaattgtataataatataaataaatcataattttagcgcttgaaaaaattgatatatgaagaaattagcattattatttgcaggtttatcattatttgtagcaacaggatgtaataacgacgacgaagtggtacaggaagctccgttagtgggagtttggcagcccgtgaaaaaagtagtaaccgtagttgcaataggagaagttcctgtttcggacggtatttcttttgataccacttgtcagcagacttcaagatggacgttcgcttccggaaatacaggaaaaagaaaagatatgggagacagtgcaaccccgggaacctgtacacctactttcgacagaacattcacttatacttatgataaagacagcaaagctattcagataaaatatcagggaattgtacagccggatcagggaagaatcatcagcatcagcgatactgctttaaacatcatgtttgaagacaaatcagatcctaccgaattccattctgaaacctatacatttaagagaatacctcagtaatagtctgaattatcaatataaaatacaaatctcatctgcggatgagatttttttgtgcattatttcatcaaatttaaatttccatttcttttaaaatcattatttttgtgaaaattagaaaaggaatttaaaagaatccggcatctaatatcttaacatctaatatctataaaaaagtgttttacgatcatcagcagatagaaaaaaagtggcagaagtactgggaagataatcaaacgtataaaacttccgacaacacagacaaacctaaattttatgttcttgatatgtttccgtatccatccggagcaggacttcacgtaggtcatccgcttggatatatcgcatccgacatttacgcgaggtacaaaagacatcaggggtttaatgttctccatccggttggctacgacagcttcgggcttcctgctgaacagtacgcgattcagacagggcagcatcctgcgattaccacagagcaaaacattacaagatacgaagagcagttaagaaaaattggcttttctttcgactggagcagagaagtaagaacttccgatgcttcttattataaatggacacagtggatttttattgagctgttccattcgtggtataataaagatactgataaagcggagcctatttcatctttggttaaacgttttgaagaaaaaggaacggaaggattaaatgccaatcagaacgatgaattaaatttcacggcggaagaatggaaagaagcttcagaaattgataaagaagacattttattaaattaccgtttggcttacagagcggaaaccactgtaaactggtgtcctgctttgggaaccgttctggcaaacgatgaggtaaaagacggaaaatccgaaagaggaggttttcctgttttccagaagaaaatgatgcagtggagcatgaggatttctgcgtactctgaaagattattgcagggattaaaaactctggactggccgcagcctttgaaagattctcaggaatactggatcggaaaatctcagggagcgcaggtgagattcaatgtggaaggacatgacgagatcgttgaagtctttactacaagaccggatactatttttggagcgacttttatggttctggctccggaaaatcctttggtggaaaccatcacaactgcagagcaaaaagctgaggtagattcttatattgaagaaacttccaagaaaacggaacgtgacagaatggcggatgtgaaaaatgtttcaggcgctttcactggaagttatgctttaaatcctttcagtggagaaagaatgccgatctatatttcagattatgttttgatgggttatggaacaggtgctgtaatggcggttcctgcacatgacgagcgtgatcacagatttgcaaagaaatttaatttagaaattaagaaagtcgtggaaacggacgaagatgttcaggaagcttctttcgattctaaagattcagtttgtgtaaattctgatttcttaaatggattaaattataacgatgcaaaagcattgattatttctgctattgagaaaaaaggaatcggacacggaacaacgaactacagacagcgtgatgcgattttctcaagacaaagatattggggcgaaccggttcctgtttattataaggatggaatgccttatacattgccgacttccgctttgcctttggaacttccggaagttgaaaaatatctgccgactgaagacggagatccaccattaggaaatgcgaaaacatttgcgtgggatgaagccaaccaaaaagtagtcgacaccaatttaattgatgaaaaaacagttttccctttagaattatccacaatgccgggttgggcaggaagttcatggtatttcctaagatatatggatccgaaaaatgaaaaaatgtttgcctcaccagaggcttcagattattggggacaggtggatttgtacatcggaggaagcgaacacgcaacaggacacttattatattcccgtttctggaatatgttcttaaaagacagagggtatattaatcaggatgagcctttccaaaagttgattaaccaaggaatgattttggggatgagtgcgtttgtatatagattgaatgctgtgttattttataacgaaggtaagaggaatgaagatcagttacctaacatttatatctcatatgctttatggaaaagtggtgaatatactaatttgatacctaaaaacatacttgataaaggtggtgatgatttcattaaactacttaaagattcacctgtacaatatttacatgttgatatttcattattaaaaacagaaggcattggtagtaatataaaatatactaatgaattagatgtagaagctttcaaaagatggagaccagaatttaatgatgctgaatttattttagaaaatggtaaatatatctgtgagcgtgaagtggaaaaaatgtccaagtcaaaatacaatgtggtaaatccggatgatatctgtgaagaatacggagcagacggtttaagattgtatgaaatgttcttaggtccgttggaacaatccaagccttggaacacgcaaggcctgagtggagtttacggtttccttaaaaagttctggaacctttattttgacggagatacgttctcggtttccgatgaagagccaaccaaagcggaatacaaagttttacataccttaataaagaaggtggtttacgatattgaaaacttctctttcaatacgtctgtctcttcatttatgatcgctgtaaacgaactgcaaaaaataaaatgcaacaaacgcaatattttagaacctttagccgttatcatttctccgtatgcacctcacatctgtgaagagctttggagtttattggggcatcaggattctatagaatttgaaaaattccctgtattgaacgaggattacttagtggaagatgagattttgtatccggtaagcgttaacggaaaaatgaagtttaaaatttcactttccgcgcagctttcacctaaagaagtggaggaagtggtacttaaagacgaaaaaatgatgcagattctggaagggaagaccccgacgaaaatcattgtagtgcctcacagaattgtgaatatagtaatttaaaaaaaaattaacattggcaaattaaaaaaaatgaaggcttaaattttttgattttttaacgtaaatgttaaaattaaaaaatattaccaaaaaaagagaaaataattgtaatatcgaaagtgtattaaattttctttatcaaaaaaatggcaaatgtttgtttaagactcttgcattttaattatttttgcctttaatttacaccttgtaaaattttaaaacaatataatttagttaaatatggaaatgaatgtttcaaaaaatgatgagcaagtaattgctagaaagtcgggaggtttaaacccagctgtaattattcctattatctttgcaataggagtttgtatttatttattcgttctaggtaacccaggaaactttaaagatgctaatgaattaggtggagcatctgttgcttttgctgacaaggaggggaaagacattcacccagaatcgttcttaggtattatctacaaaggaggggtaattgtaccaatcttgattactttcatgatcacggtaatcgttttctcttttgaaagatatttcgttcttagcaaagctgccggaaaaggaaacttagacaacttcgttgtacaggtaagaagcttactaaaccaaaacaaaattgatgaagctttagaagagtgcgacagacagcaaggttctgttggtaacgtagtaaaagaaggtcttactacttacaaagctttatctcacgatacaacgcttaacaaagagcaaaaaatggtagcgcttaacaaagcaatcgaagaagcgactactcttgaaatgccaatgcttgagaaaaacatgatgatcctttctactttaggtactgttgcaacgttagtagcacttttaggtacggtaatcgggatgatcaaggcgttcttcgcattaggttcaggaggaggtactccggatgctgctgcactttctacaggtatctctgaggctttgatcaacacggctttaggtattggtacttcagcaatcgctatcatcctttataacttctttacttctaaaatcgacggattaacttataagatcgacgagatcgcaatgagcatccaacagtctttcgctgaattcaactaagaattgtagcaaggaatttgcagtaagtaaaaagaagtttaattaaaaatcattaataataatggcgagagtcaaaccaaaaagacatggagtagtgacggatatgacggcaatgtgtgacgttgcgttcctactgcttacattctttatcttgaccactcagtttaaaaaacctgatgtggagcagattaaaccgccatcttcaatatcagagaagttacttcctgatgcaagtttgatgaccatcaacgctactccggacggaaaattttatttccagcctgtagaaaatgcatcagagagactacagcttttagacaatatgggaaaaaagtacggagttacttttgacaataatgaaaaagctgcattccagaaagtacaagcaattggggttccgatgaaccagcttaaaagctatcttgatttgccagatgacgagcagaagaatttcaagagtcctacagggattcctatggatattacgaataagcagttagtagactgggtaaaagaaagtttgaacgtaaatcctgattacaaattagcaatcaaaggagacgttacaacagaatatccgaaagttaaaagcttattcgagggtttaagagatattgattttcttaaattttggttgattacatcacaagaaggtaaacctaatgaataatatcatttagaaatggcagaagtacaagtacaggaaaagggcgccaaaggcggcaaggtacgttccaagaaacagagtaccagagtcgatatgactccgatggtggacttgggttttctattgattaccttctttatgttcacaaccacattctctaaaccgaatgtaatggatttgggtcttccggcaaaaccgaaggatgaaacaaaaaaaccacctccaacagaaattaaactttcgaactctatatctttattattaggtaaaaacaataagatcttctggcatcagcaggacaacacgtctttaacagatcagaatcttaatgaaactactttcgatagagagggaatccgaaaagtaattgagcaggcaaaagcaaatgcggctgataaaactaaatttacagttattattaagccaactgacgatgctgtatataaaaacttcgtagatatcctggacgaaatggcaattactaagagtgagcagtacggtgttactgatcttaaaccttgggaaaaagctatttacgatagaaaagtgggtaactctggtgctgcagcagctccggctactaagtaatttaaaccataaaattgtaaatctatggcaaacgaaaatgtatacgatcctaatcttaccttagatgagattgtatttgaaaatagaaacaaggaatatggtgcatacgatttaagacatcagtacccaaaacttctgacaaaatctttcatcgttggaacagcattattccttattgcggctttgtctccatttatctatcttaccattaagagacttactgaacctgaaaaacaagaagttaaagcagatttggtagaaattcttcaggaagataaaattattgagcaaccaaaagaagaagaaccacctccaccacctccaccaaaagaggaagagaaaattgaaattatccagaacgtggttcctgagcctgtaaaagctccgaaaattgaaacaccaccgccgccaatttctaagcagttagaaacaacaacaggtctggtaaatcaggaaggggtaaaagctccggcttacactccgccgccaccgccaccatcaacaggtacaaaggcgtctaccgcagaagtaaaacctcaggtaagtgatactcaggtttatacagaagttgagcagactgctgaattccctggaggtattaatgctttcagaaataaagtatccagtaacttcgatggttcagcgatgaacggagatgaaggtacagtaaaaactgaaatcactttcgttgtagaaagagacggaagtattacagacgttaaagctagcggtggaaactctgacttcaatgctgaagcaatcagaaccatcaagtctattaaaaacaaatggactcctgctaaaattaacggacaatctgtacgttatagattcagattacctttaacaatgaattttgaaggataagatttatctttaaataataattaaaaaagagaagcatttgcttctctttttattttttttggtatttttgttatatgatgttcaattggttatccctcgttacgggattattttatatcgttctgggaatcgtggtaatgtactacaggtttttcttcacagttctggaacccggagttgcctatgcattgggcggacttcttattttgtatggaattttcagaatttacagagcggttacaaaaattaaaaattcaggaaatgaagaatagtgttaagcttctaatgctgtttttcattagcataatagcagttggttgtaaaaaagaagaaaaatctccgtcttaccataaaggagaaatgacgattcttacggatgaatcttttaaaagtgttaccgaagctttagcagaaggatatatgattaattatcctgaaacaaagatcaaagtcgctacgaaaaaagaagatctcggattcattgatttattaaacaataagacaagaatcgttgtaatgtccagagatcttacgccggaagaaattaagacatacgaagaacagatcgaactgaagtttttacctgcaaaattcgctgcagatgctgttatttttattgttccgaaagattctccaaaagaaagtatttcaatggaggaaattcagaaaggattgcagtcggataataaagaatttattttcgacggagccaattccagcaatctgaattttgtggcgcagaaacttaaaaaacagccgaaagatttaaagttttcagttattccgggaagcaagaatattattgaagaacttaataaataccccgataaaataggagttatcgggctcaatacattcagccgtccttatgataaagagtctgaacagttgagaagcatggtaaagattcttcctgtggaagacaaaggaaaactttacactacagattttgaaaacctccgcaaaatggattatccttttaccagagttttgtattttttaacaaacgaaggaaacttcaatattgccaatggtttcataaggtattcgtgcactcagcttgggcagatgatcgttcagaaggaaggattacagccttacaatctctacagaagagaagttcaaatgcgttaaaaagtattaaattaatcctttaaccaaaataaatgtattattttggtctgaaaattgtgtattacttaaatcgaaatttagattagaaaatataaaatgaaagatataatgaatatgaatgtaaagaagcttgcttttggagcggctgtagtgttttttaccaactttgccgttgcacaaactgtacaggatggtatcaacagtatagacagtgataaatatgctcaggcaaaaactaattttacgaacatgatcgcttcggcgcctactgcagaaaactatttctatttaggaaatacgtatcttaagcagggagagccagattatgcggcagcaactgatagttttaacaaaggtcttgcagcagatggtaaaagctatttaaataaattaggtttagcaactgtaaaactgggtaaaggagataaaggtgctattgcggaaattcagaaaatcgttaccgattcaaaagaaaaagatgcagaagttcttttcagagcggcagaagctttaactttatttgagaaaaataactctccggatttagctattcagtatttgaataaagcaattgaaagagctgagaaaaagggtgttccggctcattactattatactttaggagatgcttacagactaaaaagaatgccaggagatgcaatgtctgcttatgacaaagctcttcctttagctaaaaataaagcatcggtttatacaagaatcgggactttatggatggctgcacaacagtggcaacaggctaagacaagtatagataaggcaattgctacagatccttcttatgctccggcgtataaagctcttgcagcttatgatatcagatatcagcaaaatgcgaaagcgactcaggatttgatcaattatacaaaatatgccgatgaagatccatatactcaattagaaattgctaagctttattttaccaatgaagattatgcaaattccaagcaggttttagataagatttttgataagattaatgatcctattaaatttaagctgagagcttaccaattgtatgctgacggaaaatatgctgaagcaaagcaaaatatggatagctttgtttctcaggcggataaatcaagagtacagcctgcagaccaaggtttacaggggctaattgcagcaggtttagctaaaactgaaacggatgctgctaaaaaaacagctttaactactgaagctcagcagaaaattgccatcgcaaaagcggctaaagatgaaaccttgaagtgggatatggaattggtgaaaatcgcaggaggaggagcttctcaggctgatattgatgcaggacctacaaaccctacgattgaaggattaaagcagaaagtggctgcaaatgctcaggactcagattctttgttcaaacttgcaacagcttatcaggatgcaaagaactggaatggtgcaatagctacatggcagaaaatgaatgcccttttaccagattgggctccgggttactacagcttaggatattcttatcagcaggctggaaataatgatgcggctaaaatggcatatgagaaattcatcagtacggtaaaacctgcagagcaggaagctaataagcagactttagcttatgcttactttgcagtggcatatatgtctaaggattctgatgtagcgaaagcaaaagactatgttgcaaaatctgtacagttggatccaacctatcaggatgcagtaaaattaaacgcagaaatcaacaaataatttaaactttaaattataaataatgaaacttcccattcgtaatgtttgggaagtttttattttaatcctatctttgattgtatgaaaacagatatattagcttttggagcgcatcctgatgacgtagaactgggatgcggaggaacgatagccaaattggtttcagaagggaagacctgcgttatcgttgatcttacgagaggagaactcggaacgagaggaacagaagagaccagaaaggcagaagcaaatgatgctgcaagaattttaggtgtttctataagagaaaatctcgagatgagagacgggtttctagaaaattccgaggattatcagatgaggatcgtaaaaatggttcgcaaatacagaccggaaatcgtctttgccaatacaattgatgatagacatccagatcatgcaaaaggagcgaaattagtatcggatgcgtgctttttgtccggattaagaaaaattgagacggttttggagggtgaggttcaggaagcatggagacccaatcatatttttcactatatgcaatggaaaaatgtagagcctgaattcgttattgatatttctgaatttttagacgcaaaaattgcggcatgcaaagcttttaaaactcagttttatgatccggattctaaggaacccgaaaccccgattacttcaaaaaactttttagacagcttaacttatcgcgcaatggatttgggcagattatcgggagtagcttatgcagagggatttacgtctgaaaagttaattgctttgaaaaattttgacggaattgtttggtaattaaaaaatctttcctatatttgcactcacaaaacggtgattgtagctcagttggttagagcgtcggattgtggttccgaaggtcgtgggttcgagacccatcattcacccaataaaagtacactttttaaaagtgtacttttttattttatatcaaatttaagttcagattttctttaattcttactgtaaaaatttatgttagacatgaaaagctacaggctaaacacaagaattggataaccgaaagaaaaaaatctgttctaacttccttaagttacttctgaagttttttattttttgtcctacaaatttcggctcaggctcaaaacttggggggaatgttaagtagttttatctttgcctaatgttaagcgaacaagaattactaaagtttttgcttccaccatacttagtggattattttgatattgtgaaatttgaagaaaaagaaggtttgcttcacctgtattttgaagaaaaaaatactatcccccaagagttctcatcccttcagcttcaatcgaaaggattttatcagcccattacagtggacgattttccgcttcggggaaaagccgtaaaactccatatccaacgaagaagatggacggatgttaagtccgggaacattgttcaccgcgactggaaactcatcgctaaaggcactcgcatgacacaggattttgcagagttcttaaaaaaaatctgccgatactaaagcccttcccttagaaaccattggtgaaatgtatggcgttaagggcaaaaaattccggaggcagtacaaaaaatcactcagcgggtttaaagactggaagcagaaatctcatgcagaagattggattatttatcccgaaaactgttctcaccgcctatcgttagacgaagtggcactctctgaaggagaactctacaccgtgcttacctccaatactgcacgaggcaggaaaagaagtcttgttgccatgatcaaaggaacaaaaagtgaggaagtaaccggcaggcttttgaaaatcagcagaaaaataagacagaaagtaaaagaaattactctggatatggcgggttctataaagcttatcgcgaaacaatgttttcctaatgccatgcaggtggtcgatagatttcacgtccagaaactcgctgcagaagctgttcaggagctcagaattcagtatcggtgagaagccattgatttggaaaatgaaattataaaacaatccagagacaagaaagtaaaacccgacattcatatttttgaaaacggagatacccgaaaacaacttctggcaagaagccggtatttactttacaaaagcagggaaaaatggacagaaaatcaaagtaaacgggtaaagatcctgtttagagaatatcccgacttagaaaaaatctaccatttatcggatagtttaagaaaaatatacaatcaaaatataacaaaatccgttgccatgttgaagttggctcattggtttaaggatgttgaagagtcgggttttaaatcattttctacactaaagaacaccattataaatcattacaacgatattctcaattattttgaagcaagaagcaccaatgccgctgcggaatccttcaatgccaaaatcaaaaacttcagaatgcagctgcggggagtaaaagacataactttctttctattcagattaactaaactttttgcatagtccccaagttttgggcttgatcccaaatttctgctaaaacaatgagattattttttaaataattcagtattgatatactaaagattattctctcaacgtaagcaaagaattgttgaatattttataaacagccagtgtggattctgataccagaaaaacatctgaaactcattaaatcagttcagccatttattcaacacttacaagcttgtaacatcaaatctgatagtttaagcctactaatctttcccatttaagttttaataaaaaatagtgatttccccatcccggaatcagggtttttcctgtaagataatgattatgtgatgcataaatttgttgatataaattaaagtcatgaaaatcacagagttcctttcaaaacttgttgcagcagtaaatgcagaaatagcagggacaccaatcgttgaactggcaaatattgctacgcttaatgatggagatgaatttctttcttcaaaatcttctattattttatccattataaatatagaagaagataaaatacttaaaaatcagaccttatataaaaattatattccatcaagcaataccatagcaaaatacaaaaatcctactcagaatttaattttatcacttctgttcacatcttataatataaaacaatctgattacgctacaggaatcgaaaaactagaggtggtaattagataccttcaaaacaaccgggttttttattggcaacctcccaattataatttattgaaagacgagccaaaaggcgtttatgaaaagttcatttttgaaatagtaagcctaaaaatcgatcaattgaaccaaatgtggtcttatttgggttccaaatatatgccttcagtattgtatcaagtaagaatgattcctatccaaaaagaagataatcttgaaagtgaggaagtcattaaaacctctaaaatacaattgtgggaaaataacaaagaagatttggcaggattattagaaagcggagagtatgaaatagaagacgaaaagttacccaaaaaagattggaaaataattcctgtagaaaaaaaataaatataaaccaataaatactgtatcatgaatattagctcaatcaaaacacccggagtgtacatcaatgagattgatgcatttcctccatctatcgcccaggttgcaactgcaattcctgcctttgtaggatacacacagaaagcagcctctctgaatgttcctactcggatttcctctttaatggaatacgagcagttttttggcggagctccttctcctgcaaatatttcagtagatttagacagtaatctgcttccattggacacttcttctgttacagaaagcaaattcaagctctacaacagtatgcggttattttatgccaatggtggcggagaatgttatatcgtttcaataggactttatagtgatgatcctgcttttgatgcagctaccaaaggaaagtttacatatggaattgataaacttgaaaaatatgacgaacctacattaattgtatttccggatgctgttaacttatcagccgctaatttgggagctgtacaatcattcgcattaatgcagtgtcagaaactgatggacagatttactattatggatgtaaagcaaagctctcctggaaatttaattaacgactgcgaagacttcagagatgaaataggaaatcagaatctgaaatatggagccgcttactatccttatttacaggcaaattttccttatcagttcagattcaatgatattaacggtatcgtcccgggaaaagtaaattttgctgcgatctacgcaacagatctgaaaataaaacctttgctggataactttgagatcacttataaaaaagtctatcaaaatacagaaccaaaaggattcagcgtaaaatggagtgaacagaataatgataaagtaatgattttaaacgactttagtaattccaaagtttacgtgaaccagttatgggattatctgaaaattcttggggagactacaactttagccaatccgtttaaaacttatgtacaaagcttaattcaggtttctctgaaacaatatgctcagaaattggttgattttaaagatatctacgataatctgcaaatcgcaggcgctgatccagatgtagatccaccgattaacttaaccccgcttgaagctaatccggatgcacattttgacgataccatctggagaaatggagcatttgcagcctcagccgtaaatccttacatgggagcgttagtcactgctggtttagcggataaatcaaaaattcaggcagctttggataaacttaattcccagatgattgctgctgttaattccgcagtcattgcattggaaaattatgtaatggaggaagaaagtaatctgatttctaacattccgcttttctcagttattgtttcaaagctttcccaatcgatgaatacagttcctccttcaggagcggtagcagggatttatgcgcagacagatgctacaagaggcgtttggaaagcacctgcaaacgtaagtgtaaacggaataataggattagcagacgacatcaacgataaagatcaggaaaacatgaacattcatgaaaccggaaaatctatcaatgccatccgaaaatttacaggaagaggaaatcttgtctggggtgcgagaactttagcaggaaacagcaaagactggcgatatgtaaatgtaagacgattagccaacatgattgaagaatctgtaaaaaaagcctgtatgcagtttgtatttgaacccaacgtagcacaaacatggattaatgtaaaaggaatgatccaaaactacttaacaactctttggaacgatggtgctttggcaggagcaaaaccggaacacgcattttttgtggcagtcggactcaaccaaaccatgtctgcacaggatattctggatggtaaaatgattgtaaaagtaggatatgctccttcaaggccagcagaatttatcattttggaattcaaacaaatgcagcaaaaatcttaattattaactctaaaactatacatcatgccaaatacagattttccgctacctaagtttcatttcagtgtagaatggggcggcagcaaaatagcttttacagaagtgtccggattaaacaaagaaatggatgttattgaacatcgggtaggttcaagccctgagttttttaaaaagaaaatgcccggattacagaaattaagcaatattacactcaaaagaggagtgtttgccggagataatgaattttacgattggtataatacagttgcattaaataccgtagaacgacgcaatatcacgatctctttactggacgaaaaccacgaacccaaagtagtctggaaagtaaaagactgttttatagtttctttaaaatgcaccgatatgaaatctgatgccaacgaagcagccatagatacagtagaaatagccaaccacggatttacaatggaacacgtataaatctaaacatcatgcctgaaagcaatcccattcccggtttttacttttctgtaatctttgagctattgccgcaatttaatgtagatacaaaatttcaaagtgttaacggactgaaagttaccatggaaaccgaaccttataccgaaggtggacaaaataaattcaagcatcatttgccactgcgttccggataccaggatttggttctgaaaagagggcttacctcggatatgtctggtttatcgatgtggtgcagtcaggcgttggaagattttgttttctctcctgctaatctcattatttgtttattaaacgaaaaaggaaatcctctgaaagtatggtatgtatcacacgccattccattaagttatgaattcagtgattttgatgccgaacagaataaaattgtcattgagaccattacattgaagtataactttttcaaagaacttccggttcctaatttttaataatgattaaaagatggctattcagattaaagaattacacattaaagtgaagattgaagaagagccggtacattctgcccgttctcagaaaaatgatcctttaaaaatacaggaactaaaatcgcagctcattaaagagtgtactcgtgaagtattggaaaaacttaaagaaagaaaagaaagatgatacaggcagcattagggattatagacaaaatgaggatagaagtatatgaaacgagcgactataaaaaaactcctaaaaaaaccattttcgtacagctaaatccagagaaatatatccgccggaacaatgtcgtattttctgaagaacaaccaataggagcatcttcaggcaacttgggattcaataaaatagatggggaggaagtaacgtttgattttgtttttgacagttctggcgttgtcccgccgggaaaaataaaagacggaaaaggagaaatgtctttgttggataaagcaggagatgtccttggtgcgctttctcctgccatcgttaatccttttacagaagtaaaatctgtggaagaagacattgaagcatttaagaatcttaccattggctacaacggagatactcatcaaacagcctatctccagattctttggggaggattcaaattgcagtgccgtcttaaaagtatggacatcgaatacactcttttcagaaaagacggaagacccataagagctaaagttaaatgtgtttttaaagcaaccacaacccatcagattatggttgcacagcagaataaaacctcgccggatcttacccacttcagaaccgttacaatgaatgacaagctgccactgatggcagaaaacatctacgaaaatgcttcgtattatatagatgttgcccaaaccaaccaattattaagtttcagaaaaatagaaaccgggcaaaacatttcgtttccgcccattaaataaaatgatatgcctgttcaaacttacataccaacggatgatcttctgaaactggaatttttaacagaaggaaagaataatggtctggatactttgcttaaacaggcacaggtagtttttgaactgaataaaataccgtttgccaaatttacttttattgcttcaaatccagatgtagatgcgaaaacagatttaccgacagatttgcttaaaaaaggacagaatatagaagtaaaaataacggtaaataaaaaatctcagactctgtttaaaggatttgtaaaatctattgaaaaaagcatcagcgaaagtgctgttacggtaaaaatagaatgtaaagatcaggcttatcaattaacgaaaccatctaatgaatccgataacagtaccgaaacattcaaaacaaaattagatcgatttttatcgcaggctaatgttacaaataaaattgaatctaagggacaaagctgggaagaagaatatatcagccgcaatctccatacaattccttgggattatctggtcggatttttagactcaatcggaatgatggttagggtaagaaatggtgaattcaatgctttagatattttagaaaccgttccggaagaaaaatatactgcagaaaacggaatcaatgtattcatgttttcaggaagagaagacgagtcaaaaaaattaagcaaggcttcgattgaatattgggatccgtcttcccagtcaatggaaaaaatagaagcagaacaggaagctgaaaaaaatatcaaaacattgtcccttaacgaaatccgttttttgacttctacaatgacaagaatggcaaatacatttcttaaaagaagcaatcacgctgtcattcagggagaacttttaaccttcggaaatctggaagccaaagcaggagattttttgatttgtaataaaatcaataaagaaattgataaaaagaaattattaatccgtaaagaataccacaccttcgaaaatgccagttggaaaaccgaatacactttgggtgtagaatcagaacagtcttttactgaaatcaattcgccatccgttcctgctcaacaggcgcaaaccggacaaaccaattcggtgaacggattacagattggcatagttacacagattgaggaagatcccgataatcagttcagaataaaagtaagaatacccacactttctgaaagcggagaaggaatctgggcgagattatctaatgtattttcaggaaacggaatgggaagtttttttatccccaatgtgaatgatgaggtaattgtgggatgtctgggaaataatcccgatacgcccattattttgggaagtctttacagctcaaagaatgcaatgccttttccgataaaaaaagaaaattataccaaagcttttgtaacaaaagaaggtacaaaaatacaattggacgacgaaaaaaaatctattgagctcagtacaaaaaaaggcaataaactattaataagcgatgatgaaaaaggctttgtacttgaagacgaaaatggaaataaaatagtgatgaatgccgacggaattacattagacagcagtaaagatcttattcttaaagcaaagatgaatttcaaaatgaattcggcaaaagcagcactttctgcgtctgcaacaatggatgtaaaaggatcaatcataaaactcaattaaattatgcctgcagcagcaagaaccggcgacatgcacgtttgccctatggttacaggaacagtaccacatataggaggttctgttttaccgggaggaaactctaccgtattaattggcggaatgccggcttcggtagtaggagacagttgtgtttgtacaggaccgcccgataccattgtaaaaggatcggcaacagtacttattggcggacttcccgccgcaagaatgggagactctacagcacatggaggaacaattgttttaggttgtcccacagtgattataggagattaaaaaactaaaaactatgaaaacagatgattttttaggaaaaggatggggatttcctccggctttcaatactgttaccagaacagcagaaaccgtgtccggcgagaaagatatacaggaaagtctccagattttactcagtacacagcttacagaaagaatcatgcgttcagactttggctgtgatcttactccgcttctgtttgaaaatgttacggtaacccttcttacaaaaattaaaggcattattgaaaatgccattttaacgtatgaacccagaatagatgtaaatgatatttattttggctcggaaacaaatgatgcacagggaattatcaggattgaaattgaatacaccattcgtgcaaccaactccagactgaattatgtattcccgtattatctggaagaaggaacccatattaaaatctgacatcatggaaaactgttcttcaaaaatatcaatccatcagggaacgggaaccacccaaaatgcaaggtttttatcagccttacaacccacctattttcttctggaagaaagagaagagatagattatgttgtattggctcagagaatgtctcattaccttcactattttaatgaatctgactctactattgcacaaagcgactggtcgccgtttttcgcctgggaatctaccgcagttttagcacaaatcttcaaatggaatattgaagattacgagaaaaaatatgaaaatatcagaaaatcagttccgttaaccaatgataacgaagaactgaaaaaacaagtcggggaaatttttggaaaaattcagaaagattttatcagccttacagacaaagctgaaactttagatcatcatatttcagtaaaagaatttttattaagctctaaaatagcaattgagatacaattaagttctgttatctcaaagatttcagacgaaaattcaatcattactttattacaaaactatcagtttaataaaaatattcagaatcttttcggattacttttgtattggaaaaacagcactgaaaaagcattcacacaacaattagaaagctatccttcccacactccgcattacgcactgtttttggcttttttaaaactgttgggtattgcaaaaaatcatctgaatgactttacaaaaagacatctggatttttattacaaagatattttacaattgcttccgcagaaagcacagccggattttgtccatcttttgatagaacctgccgtcaatacagatgcttttctattgtcgaaaaatactattttttcagcaggaaaaaattcgttggggaaaaataaattttatgcttccacttcagatcaggcaattaattctgttaaaattaaatcttttctaagccattatattgatcagaatatctggaaaaaaacagatttatttcccttaaacgctacgaatactcctttttctgcttttcagtcttcagaaaatacagaaacagggctacttctcgcaagtcctttattttatatgaagggcggaacaagaattattactctgaaatttgattctcagattttaaatccgaattcattcgatttctggatcacgggagaaaaaaaatggataaaaattactcaggaaaataaagaattaacgcaggataaatatatcaaacttaccattcctgcttctgaaaaagcgattgttccgtttaataaagaaattcatgaaggagaagcaattgaaacccttcatccgatacttaaaataattcctaaaaacaatactgaaaagattgattgtaaaacgcttgaaataggaatcgctgtaaacggattaaaaaacctgattgttgcaaccgacacaggagttgcagacatcaataaacccttcaaacctttcggggattttcctaaaaacggaaatggatttatcatcggatgcaacgagttttttctgaaaaaaggagctgttgccagcttttcaattgaaagtgatgctgcttcatcttatgcttttgcaggaacattaaactctccaattctgaacaacaccatcagcttagcgcaaaccggaaataattttgcacaaaataaaatttcaggaacccagagtgtaagtctgaacacgaacctttcgacaacagttaataatttgatcgctcaaacatttgtaggttcgttttttgcgtacaaaagattggttgatagttctttattgtttgaaatgaagaaaggaagatttattaacgaaggaagtaaagcttttaattctgtatatacaaacaatactcctgtaaaagaatattcggaggacgaaattccggataataaaacggtttccggatacataagaattcagcttaatgatccaaaatacgaaggtgaaaaatttttacaggattatataaaagcagcaaaacaagaatctccggttttaccgaaagttcctgttattcagtctttggcaatgaattattctctcactcaaaaatataattttaatgcttcagatgatgctcttaatccattagaattttatcatcttttaccttttggatatgaaaaattacgtccgaactcttcgttgtcattaattccggatttgccacaaaaaggagaaatctatatcggatttgaaaatgcacagcccggaaacggattaagcattcttgttcaaatggcagaaggaacagtcaacccgagaaaagaacccgccaaaatctcttgggaatatttgtcagacaatcagtggaaaccaatagactcatacgatattggagacgaaacactcggtctactgcaatccggaatcattaacattaccgttcctcatttcgataattcgcaaactgtcgttttacctaaaaacctgttttggttaaaaatctcagtgaatgaattagaccggatctgtcattttgtaggcattcacgaacaggctttaaaagctgttttatttgattttgaaaataacggaagcggttttctggaagttactccagaagagacgatttcaaaactatatcaacccaatccttttgttaaaaaagtaaaacagccatatccttctttcggagggaaaaagcatgaagaagatacgcgattgtatcaacgcagcagcgaaagattaagacataaacaaagagccataacttcatgggattatgaaagactcattttacaggaatttccggaagtgtacagagtgaaatgcctaaaccattaccgatatgattcaggaaatatttccaatgtttctgcgggatatgtaacgctgatcccggttgcaaagtcgctcaattcatccaatgtttgggaatggaaacctttactaagtataagtacattacaacgcatcaaaaacagaattatgggatggtgttctccgcacgttcgtttgtgtataaaacctcctgttttagaaaaaatccagattggatgcaaagtgaaatataaagatattcccggagcagatatccgtttatatgctaatatgcttgcagaaacaattaaccgttacatcagtccgtgggcttacagcgatcttgatattgattttgcaaaaaaaatagaattatcctcactgattcagttgatagacaatcagtcttttgtagattatattattgattttaaagccaatcacctcattctggatgatgaagaaaatatggtcatcaaaacaatggcagatgtaaaagaaattgttccgcagacagattacactttgtttattccgaacgatacccatgaaattaaagaactcaaaaacaactgttaaccatgaatcccgaatattacataccgtcagaaagaatattgaagccttcgcagaactatgattttttgcgaaaagaaggtttgaaatatattgagaaactgggaaacactttctggacagattataatgcgcacgatccgggaattaccattttggaagcactttcttatgtgataacggaattgggatacagaacagattttgagactaaagatcttttgaccaacaaaaacggaaaaatcctgaacggttcgtttttcactgcaagagaaattatgaccaatgctggattgactgaactggattacagaaagattttaattgatattgaagggattgccaatgcatggtatttgtctgtgagaaaggaaaccgaccagtttggttataatctgccgcatccttcagaacaaaaactgtacatcaatatattagaagacaccttgagttttgcctcaaaagataaaaacaatacttcgttacaaccgcttttggtaagaggattaaataaaatcattattgagctggatgaggatgttgtgctcggagatctcaatacaaccagacttgagtttgcatttttacattcttcaaattgggtacaggttaatataacacccgaattttcctcatggaacgatcctaaagctcttcttctgggcaaaatggataaaccttccaaaataaaaaataaaaaaacggagatcaaaaacaatatggtaattgttcttgttgaaagaaccacacagatcaatgatactctgaaactgattgtagaacctattgataagaatgatcttcaaaaggtaaaagattatttcagtacagaaaaaccaatctgcgagatcatttctttactgaaagacaaaaaagaaaaagtagacggaattttcagaaccgttcagcaaaagctgcatcaaaacagaaaccttaccgaagattttctgtgtgtggaaatcatccggagtgtagaaataagcttctgcgttgatgtagaattagctcctgaagcagattctgtggagacaatggcacaaattcggatggcgattgaaaaaattctcaatcctccggttcggttttatactctttcccaattaatggaacagggtttaaattccaccgaaatatttttgggtcccaaactaaaacacggttttctcaatgacgaagaactccggaaagcacagcttccaaagagtattcatgcttcagatattattgccgccatgatggaaattaaaggggttatttcggttgaaaatcttttgatgacggcttatgattctttaggacagccgattacgggaagtatgaaccaaaaatggtgtcttcatttatcaggcgaagaaaaacctgtattctctgcggagaaatcaaaaatattgctgtttcagaaaaaaattccattccttttatcagaaaacagccagatgttggtcgatcagaaagttcagcagcttaaagctcaggttaaaaattataaattatattcagtccagagtgatttgcctgtgccggaaggacaattttatcaactggatgaatattacagcgttcaggaagaatttccggtgaattacggattaggagccaacgaaatttcggataaagcacccgaaaagagaaaagcacaggtaaaacaactaaaagcgtatcttcatttttacgatcagttactggcagatttcttctgtcagttatatcacgctaaagatattctggatattgaacctgtaaaaaacacttattttcccaattatctggataaaaacccgaaaacgggaaaagatttttatacaaaagaaatttacagggataattttaagaacgcattattaaacggtgaatcagaatttgatgtttctctggaagaatcgcaatccatcttcaacggcagaagaaaccgtgctttggatcatttgatggcgcggttcagcgagagttttaacgattatgtctttatgatgtacaaagtaagtcaggattcaggaggtttgggagaaatgacttttcagccgcaggatctgattcacgataaagaagcatttttaaaaaattacgcagagatcagctcagaaagaggattgggaataaactatctcaatacagaaattcttgaggataagttcggttttcagaatttctgggaaacagatcacagaggaggttacgaaaagagaactgcaaaattattgggaatcaataacatcggattaagagatattgtaacggaagatgaggttcagacacaatggacgttgcctgtaaatatgaataatcagtctattatctgtaaaattgtacagcctttaacagatttagctgaaaaatggaaatggacacagcaaaatttactcaatccggatatttacttcatccataaacagggaagtaagtttttcatttatttaggcgaaaatcctaagaaaacagcaaccatagacaaaacttttaaaagctacgaagaggcttcagaatttttgtatcagctcattcagctactgaacgaagcgtatgaaaatttctattgtctggaacatattttagtaagaccatttccttattttaataatgataaagaagatcttttaacagtttgcctcaaagatgactgtaaagacgaagcgaataacgatccttattcctttaaagcaaccattattctgccgggatatttatcaagatttaaaaatattactttcagaagatatgcagagcagattttccgtcaggaagctcccgctcatgtattgctgaaaatttgctgggtagggtatgaagatatgctgaattttcagaaagcatataaaaactggctggaaaactacagatacttcagacttaaatattgcagcaggactttaactaaaaaagattgtttggtattttatcagtatcacaaaatattgattgaaaaactgaaagaactcaacacgatttatccggaaggaaatttatacgattgtaagctcagcgagaccaccaatccgattgtattaggcaacacctcattaggaactctttaaaaattttaccatcatgaaaactcaaaacccatccaaatatcctgtttttgaagccgatcaggttttaagccagaaacatctgaaccgcgccatcagttaccttgaagaacaggacaggcttacccgtgttggaggtataggaattggtattgtctgtggtctggaaatttcgcatccacaaccgaaccagattaccataagctgcggtacagctattacttcattgggataccagatcaattgggaagaaaaaaccttcggttattatcattcgatcgaattatctgctgattttctcgcttcgaaatttatcgatggtgaatatctggaacttacgttacctcatgccaaaaaatatgagccgttaaaaaattccatagaacttttaccgaccaatacgctggaagttgaccgaattgcgatcccgaataattttttcaaggataaaattgtcattctgctgctcgaaacttcactgattgacgaaaaaaactgtgtaaccaccaattgcgacgataaaggcaagagaattgagtttaaagtaagacccttgttgatctcaaaaaatcagttaaatccttatttgttctcggaatatccgaaagcgatgaactttgaaaaaatttcattatcaagatataatgttcctcataatcaattaataacaggttcggatgttttaaatgaattcaaaaagaatttggcagattccgtagtaactcttgtttcagataaaataaatctggcttataaaaattacaaattgattattgatgatatggttgatttcaatgtattgaacaatcctaaaacggctctggaaacggtaattaatgctcataaaaacagtgttaatgtacagtatttatgggattggatgtcggatattgcttctgcttacaacgaaattatagaatttaatgaacggaatccttccctgtgctgtgtagatgaagctatgtttcccttccatgttgttttaggaaatgcagatgatcatgatattaattaccgaactccgtttttctccactcaaaacagttcattaaaaaacaagcagaaaagaaaagagctgtctctgttatttgaaagattagttcatcttataaaattttggattacggaagatcatgtaataaagattacaccttctttttatggggatattccgctttctaaaaaatcaattcctttttattatgatcagattgtagagcttaataaaaaatggaatccaaagaaaacagcaaaaaataaaaataacgagatcctctcttatcattctgaaattgcaggttataccaatctcgacagtgtaaaaaaacctttactgtatgatattgaaccgtataatttcttcagaattgaaggacatataggaaaaaaatatacagatgtggttgaagagctgaatattatgaaaaacagctacaatctgccgtttaaaataaccgctttaaatgcgactgattttgtaggaaaaatactggatatatcaaaatttgaaggaagatgggacgatctggaaaccgattatgatttagcgagaaaaagattatacaacatcacagaatttgtagttaattggatcataagcaacaaaacaacaattgttcagcaaaatttactggcggcagaaagtattgataatcttaaaaatattttgatccagattaagaatctgttgccgaatgatctgaaggattttctgcccaactttacaaattttaatcaggttttcaaacagttgaaccagactttccttattcacagatggtgtattcagtttacgaaacctcaattatcaactacagcagaagatctcatcgaccgatttgatgacattaatgaactttttctggaagatccttttgcggttatttatgaagaatctcaaatccgctgggaaaaaatttataaagatatgttcttttccaccttcatccagaaacatccgggaattcagcataaagcaggagttaccaaaggcggaacatttattctggtgtatgtagattctacgatttttaagaccgtgaaaccacttttgccttacacgcagattttgactttactcaagaattatcagaataattttactcaggttcctgtaagtgtaaaacaggatattgaagcaagcattaattttaaagattatactgcacaaatcattactccacccgtcgaagagttggataaatgcaaacaggaaaccgaaaacatcaaagccaacatcctgaaaattgccgattttaatatgtctccgacgtatacaagagaaatgagatcttatttattgggaaaactctcttacgctatgcagtttcaggtgaatacagcaaccgatattcctaatcagcaactggtgatcgcggatttttttcttccttatctatgttgtggtgagggtaatacgattgaaattaaaatagaaaaatctgaacctttgtctatttcaatgaaaacgctaaaatattgcaatacagatgataaagagtatgaagttttgataaaaggaaaatccggcggaattttttcgggaacagcaaaagatgcagtcgttcagaaaagtgacaaatatttcttaaaaccaaatcacacatccgttaaaaaagccggaaaatatactttacagtatgaatttgaaggcgaattgagcaacagtttagatgttgagatttccgaacccaaagatatttctaactggagtgctgtaagagattccagagacgcgacagcttttgagttgataaatacagatccggaagataaacatcaatatgagattgattttggcgacaaatctgaaaaaataactaccgataaaaaatctttaagacatatttttccattcaacgaaaaagtaaaatcatttactgtaaatattaagcagttaggcgaaatctgcccaaatacacagcaaatcatcgtaagaatcggagattttaacaatcctgatttcaacgaaaaagattttaatacccaaaaataataacctcaactaaaaacaactatcatggcaacaagaacacaggtagaagcaaaaatagcaggaataaatgatggcggaaataatacagcagcagaagtacgggatgtacttaccaatttgttagactatacagaaaataaagatgcaaatgtacgtttgccattatttgaattctgggaagagaatcctcttttgtctgaaaaagataccgctaatttatggtactcgtttcggggaatcgaaaatacatccgtaaattttacattcagattggttataagagaagccaacgttacaagttttacattccggatagatcctaaaatttccgaaactttaaatagtttttttcagcaatttgataatgcattaatgtcttttgtggtatctgtaacggatgttgaaaagcaaacacaaagaatctggacaatgagtatgagattcagagagaatatattgaggatttctttgaaaaaagaaacggcagcaactaatgatgcgataaaacagtttgatgaggtctttacttcagtttatttccattgtcctccattcaattttgatagaaaataatcgctatgcatcttctccaaaaacatattgttgatgtacgatgctcttctcaagtttttgggaaagagatacaaaatacattgtctgatgttctggagaaagatttttatccgaaactggaagccgttttagaccagtattcagttgaaaattacgaatgggaaattgaaaatctaacaattgagttacccgatatttctcaaaaaaactggaaaaaagagtttataagccagacattaattcaaattgaagaatatctgaaaaataattttcctgttttagcattagataaaaccgaagaaaaattaaagaatttcggatttgaatcacatgcaaaatttgccgagaatttattttttgaatatttaaaaacaggagcaattgcagaaaattcatactcgaaaaatgcagatgaaattgtggaagcaatagaaatctcagagctattttgtgaaagacttattcgtattttcgatgaaagccaaaatgcgttaatcagattttattttaacattaatgaatcttttaaagaaaaagtaatttttgaagtattaaaactttcgacttcaaaacaaaagatttctgaattgttaaacgatttttttaattctgatattaaattttccaccgttgaagagctggaaaaatggatttatcatcatcaaaatttctccgaaaatcaagatcttagaaatgaaaaattataccgtaaagacgaagaaccattcgagtctgatcaggaagaaataatgaatcgggaaaagtgttcaaatgaagttgacaaagaaaaacgttcagtaaataataataaaaaatctgaaataaataccgcgaatacttttaatgaagacagtcatcaaaatctgaagacagatcaacaagatattcgcgaaaatacaataacaaatccatcagaattacagatttcatctctttacatagacaatgcgggtcttgttattctgcatccttttcttttaaaccttttccagaaactgtatttatgtaaaggagcgatttggacagacaaagaaagtcagcacaaagctgttttattaacccaatatttaattacaggtaaggaaattttctttgaaaatgaattgattttaaataaactgatgtgtggctttcctgttgaaaatgtaatcgataccagactaaagctcagcaaagaagaaaaagaaatttgcaatgatttgttgttagtcgtcatcgaatattggtctgtcatgaaaaactcatcagtagaagcactcagagaaacttttttacaaagagcgggaaaattatccctttctgaagtccattcttcagaactgtgggtggaagaaaaaggagtagatgttttgttatccagcttaccatggggaattggcatgatacagacaccttggatggaccattttttacattgctattggaactaaaaacaataagatcatggaagcagtaaaccttcaaagagaacaaaaacaaacatcaaaaaagaataattcaacatttttcaaacctgctattcaaaaaaaactgagtgtaggttctgcaaacgattcctacgaagtagaagccgatcaggttgcagataaagtaatgaaaatgagtgaaccttccccacaaactatccatactggagcattgcttcaaagaaaatgcgcagcctgtgaagaagaagaaaaactccagatgaaacctttagcagaaagtatttcgccacttatccaacgctcgtcatcagaaattggcggagttgcaccaagtcacgtagaaaaccaaatcaattccagcagaggaggaggaagcgtaatggatcatgaaacaaaaaactttatggatagccgtttcggaacagatttttccaatgtgaaaatccatacaggaagcgaagcggtacaaatgagcagagaactgaacgcacaagcttttgctttaggaaatgatatttattttaatgaaggaaaatacaacccaacttcagattcgggaaaacatttgttggcgcatgagttgactcatacagtgcagcaaagtggcggagtggggaggaaaattcagaaatacagccaccaagattgtaatgaaacaacagatttgcgacctcatatttggccagcaaatcatatagctattacgatggtggataatgcgatttctgcgcttacagcttctacagtaagttcttctacgatttctcttttggataatcattttaatagccattcttcaagtactatttcatcagttttaaaagtgtttagaaaaataaaagcagcttttaccgcaaataattatacctatgaatgcgaaaatgattgtgatggtgataatgcttacgtttatggaatatggtcggatatacacttatgtatgaataatttaaggggtagagacaatagaggtattgctgctataattgttcatgaattttcacattattatggaggtacagatgataatgtatactatttttcttttggatcaggtactattccgtctactttatctgtttctgatgctatagataatgctgattgctatgaaggattcgcatattatcataattaaaaatcataaatatggagacattcattaatcaaaaagaacaaaaaatacaaccgaaaaaaaataatgccaattttttcaaacccaccattcaaaaaaaactgaatgtaggttctggtaatgattcctacgaagtagaagccgacaaagtagcagataaagtaatgaaaatgagcgaaccttctccgcaagttactcatacaggagccttgcttcagagaaaatgtgcacattgtgagcaagaagaaaaacttaggatgaaacctttagcagaaaatatttcgccgttaattcaccgttcctcaaaagaaagtggaggagttgcaccaagtcacatagaaagccaaattaattttagcagaggagaaggaagcgtaatggatcatgaaacaaaaaactttatggaaagccgttttggaacaaatttttcaaatgtaaaaatccacataggaagtgaagctgtacaaatgagccgtgatttaaatgcacaagcatttactgtagggagtgatatttattttaatgaaggaaaatacaatcctaattcagattcgggaaaacatttgttggcgcatgaattgacgcatacggtgcagcaaggagaaaggttaagtaagaaaatccagagatatacggaagcggaaagacgagaaatggcggaaagacgagtagtaggacaaccgcaggatattgctatggcaactgcgagaagttttcaatcgggagatattgtttttagattaggaagcacggctttaggatttgtttcagggcaacaagttactcatggaggaatttacataggctctggacttattcatgatgcggtaggatttggaaatagaaatgttcgagtaaccaatttttataatcctgctttaggtgaggctgcggataccagtacttatcgtgttatacgttttataggccctaatgcgacgctaataatagaacgattggttcaaaatatcaattccggagtttttgatatgcccacagattctgttccgtttaacttattcagtagtgccggagattacagaacagcaacatgtctagaatatgcgcatgctcaatttttattcgccataagaagtttagttttggatacttctatttccgaatcggttagaacttcattaaggagcacttattatagagcaggagtaaccgcacccagtaacttaataagccctactacacaaagaatgatgggaacaccaccctctttaagcaatagtgggtatagtggctctggatatggcagtagtggatacagtggcttgggaggaagtagtggtgtgagttctcttatcctcacggcaggtttagttacagcagcatctgcacttgctaccgatgtagatacaacccgatttagaaatagagatgagtcaacttacagaattgtttatccccgcagtggaagctcatggggagacgagatattaaatactattacaggacctttatatgatgaaaatatcttgagtacattcacctatcagtcatttgttaatagtaaacagttttttaccgttgccgctagttcttaaaaaccaataattaatgctcttccaaaacctaaaacattacatcataaaatctcttgcttctcaaaccgaggaagcaaagggaagcaataatttccaaaatacattctctgaaatattaggaagaccaaccactcacgaagaagctctcattttattattggcaatagttcctcatgttttgccgaacttttttgatgatattattaaagaaatacatcccgaaggcggtgaatttccggaattgggaggtatccgtctggaaaaccacagaggaatgttgccaacaggtgaaacagcacaatatattttagcaaaagaaaatattgaaaaacgattagaaattcagcaattatttgaagtatctcattggttttttaaagatcagattgttgttttagattctgtgaaagaaggagagcctttcatgagcggaaggcttattttgaagcctgaaatcatacatttattgttatacggagaaaaattgaaacctaaatttagccaagactttcctgcaaaagaagtttccactcagttacaatgggaagatttggtggtaagtaccactattcaaaatcagatccatcaaatgagactttgggtaaagcatcaccagactttacgtgaaaactggggaatgggaaaacatcttcttccaggctacagggcattgttttacgggccttccggaacgggaaaaacattaacagcaactttgttgggtaaagaatttggcagggaagtatatcgggtagatttatcgcagattgtttcgaaatatattggagaaacagaaaaaaatcttgaaaaaatttttacacaggcagagaataaaaactggattttaattttcgatgaagccgatgccttatttggaaaacgtacccagacaaaatcttcaaatgacaggtatgcgaatcaggaagtaagctatctgctgcaaagagtagaaagttttaacggattggtgatactcacaaccaactttaaaaataatatagatgacgctttcctgagaaggtttaactgcttaatatgctacaatagaccgactgcagaagaccgattggtattgtggcaaaagatgattccggcaaatataactttagaagattctgattttttacacaaagttgcagtaaagtatgatttaaccggagcccagattgtttctgcaatcacatacgcttgcttacaggcaattgaagaaaatattttgttgttgaaaaattcatttttattaaaaggtatagaaacagaatatcaaaaagaagaaaaagctataatgctttgatccgatcggtctgttcttatgacaagaggaaaaaattaaattagtaaaagctcttaaaataactttagttttctaagaaaattacattaatctaagtgttgaaaataaaaaatgtaaaaaattattatttataataacaaattataaataataaaaagtaattaattcaggtttataatttatgttttgatcaaaatatttaaatatttgtttaatgttaattttacaatgattttgtgttaattcaagcaaatttttttgagtaaaaaaaaaatatatatttgcggaaaaaatacgagaatgaaaaaaatattacttacgatgagttctctagttgttgtattctcttcagcacaaacctggaataccgcaggaaacagcggaacaaattcatctacagatttcttaggtacaatagatgctcaacctttaatatttagaacaaacaattctgaaaaggtaagaataacgcttaatggaagtgtaggagtagggactactactccaactcaaaaattagatgtcaatggttctgttattgctaacgaaaggtacaataatggtaatgatggttcttactatattaaattaaattctaacggatacaatatacctattattagctatttagaaagttctggtaatacattattttttggtaatcctggaggacagtatcatagtaaaacaattatacagggaggaaatggagatgtagtattagagccccactctgctagtagtgcttttgtggttaaggcaggatcgggtaacgtaggagtaggaactactacgccagataatgtacagaattgggataaggtattggatatttatgcttcagcacattctaaattattagtacgaagcttaaatgtaaaaacagggatattttctcacgaaacgtggggaggagctgttggtaggatagggacggaatcaaatcatgacttaagattaatggcaggctatggcaatgatgtaatgacattaaatactattggtaacgtaggaataggaattaacaatccttcaagaaaattaactgtaaatggagatatctatggagtggccgcttcttctctgacatttcaggatgatgcgagatttactgtaacaaacgcaaatgtaccaaatttatcaacttctttaaatacattttctatgcctcaatatggtattgcagctccgaatacatctggtagtgcggatttatggatttcaggaaataatgggataagaatgtttacaaatggaaatccaaatcctcaatttaatttaataaacggtaacgtaggaataggaaatatcactcctcaagctaagctggatgtaagtggagacgtaagaatagcaaatattcctacttctacatcatcaacggatcaagctttggtagttgatgcgcaaggatttgtgaagagaggatctattacaaatagtttacaaagtaataacatctataataatattctctattatcattctggatgtgcagtgattaacaacggtgtaaaaataaaaaccaacattcctttcccagcaagtggctcaggaggagaaatgcctactgttaatattgaagggtttgcttatggcgagagcaaaacaataggaataaatattaattggtatgtatggcagaatgagttttatttggcatcaaatgtgagttcttatggaggttatacaccaattgtaaagttggcaaatgaaaacggaaaggttgtaatctttttggatgacaagacatattgtatcaattttggagttaaagctatcggaggaggtgatccatcatattatcaaggatggacaattgctgatgagcccatcacaggaagtattactaaaacactggcatacaaaaatgcatttggaaatgtaaaagtagatggaaaattagaagcaaaagaaataaaagtaacgcttacaccaacagcagattttgtttttgaaaaggaatatggtttaccaaaacttgaagaagttgaaaaatttgtaaaagaaaacaagcatttaccagaaatagcttctgcaaaagaaatggagaaagaaggagtaaatgtaggagagttccagattaaactgcttcaaaaaatagaagaacttactttgtattctattgatcttaataaaaaaaataaagagcaagaggctttaatcaaaagtcagacagatattcttaagtctttaaatgaaagattagagaaaatagaaaagacaaaacagaagtaacccttaaaaacattatccgatgtataaaatttaccaaaagtcagtttttggagtttctgtattgtttttcatatctgtcttttctcaggataataatgatattggtaggaaattactggaagatcagaaaaaatttcaatcagaaattactaaaaaagaaagcaaacaaaagcaggaagtagaacggttaaaatctttgggtattcctgagtttatcagcaaagatggaaatgataaacaattaattggatccgatgaaagcggaagaccaatgtactatactacattgaattcaggagctgcacagatgactaaagccaatatattgtacgccggaggaagtgcaggattgaatatctctggtcaaaatatgattatagggcaatgggattattcaaagccaaggactacacatgaactgctttccggaaagattacttatgattcctctcaaaatcaaactataacaagacacagtacgaatattgcaggaaccatggttggaagtaatggagacgcaaatgcaagaggaattgcttttaatgctacacttcacgcatacgactgggtaaatgatgtatcggaaatgcttaatgaagcctattctcctaataacaccgctggtattttagttgccaataacagctatggcttcgatcctttatatctgcagacttatcagtttggaaaatataattccacagcacagaattgggataacctgatgtatttaagaccatatttacaaattgttaaagctgcgggaaattccagagaaatagatcccgctcttgttcctcaggtaaatgcgaagggaggatatgatttacttgaaggagcaggaattgctaaaaatgttttggttgtggcttctgctaaaaagaatcttaatatgaattctgatgaagattttgatatttctttattcagcagttatggtccaactgacgatggaaggattaagccagacttatgtgcacctggtgaaactatttattcatctattgaaacttatgattctgcttacggaacctataaaggaacttcatcggcgactgcagtagtttcagggattattactttattacagcaatattataaatctgtaagttcttctcaaagttatatgcaatcttctacagttcgtgctttgctggcgcatacagcaaatgataaaggaactgagggccctgactatatttacggatggggaatggcagatgcgaaaagagcttctgcagctattcatgataatattgaagggattataggcgactataagaaatctacattaataaaggaaatttctcttaatcaggggaataaatatacattgtatgttgttcctttggatattagccagcctttatctgctacgatatcatggacagatcctcagggaaatcttgtgaataatactgtagacctttcaacacctaatttagttaatgatcttgatcttaaaattgttaaagtaaattcaaacggtagtgaaactgtttattatccatggaaattaggtggcatgaataaccttacgtctgctgcaacgaataactctcccaataatgttgatactatagaaagagtagatattaaaaatctaacaaaagatacctacaaaattattgtatcacctaaaaccagcacaagtccattacttccaaacggtattcagaatttttctattgtggtatctaatgtagatttctgttataaagaagatcttaaaatattgacaagtccggttgatgacatcagtactccgcaaactatttgggcaaagcagattgtagcaagcaataaaattattgctcctgtacaaaatgtagaatacatcgcttcaaaagatatcacattaaaaccagacttccatgcagaaaatacttccggatttcatgctcttattactccgtgtttcgatattatttcagcattcagatatattgcgcagaaaagagtttcggatcaggatgttcttccggaaactataaaaagcgaaagtaattttacaatctttccgaatcctacaaaggatgaagcccacatcaagttcagattagaaaatgcatcatctgtaaaaatttcagtatatgacgcttctgggaaaattatttttgtgaaccagagtagcgaatcctttccaaaaggcgaatatttaaaaacaattgatgtgagtgattatgcttctggaatttatctggttagtttagagtgtaatgactttaaagaaactaaaaagttaattaaaaaataaactctctgagaatttaatatttcgccaatacgtgcgaaaaaaattattcagacgattctcagagattacaaaattttcaaaatattgaaataaacacttataatgaaaaaaatctttttcttttttcatatccttttactggatatgtgttttgcccagtctcctggtggtgtttcgggggtgagtgtttggtttaaaactaattctgcacaaactccggcattaatttatcaggattatagtggaaatcagaatgaaattcaagcaatatctttacaaaaccgacctaattatacattatttaattataatgaaagtctggattttgacggagtggatgattatctgaaatttccctatctcatggaaacgatggatagaactaccttgtttacagcatatcagaatcaaaatacgtctacggaaacggcgatgttttcctcagaacaatcgtatgaaaaggaaatgtatttcagcacaaaaaatattttcagatataataatgaacagatcaactatataaataccagtgtgatagatgatctgccttcattcagtatgtacacaagatttggaattccttctgaaaagatacattcagttatagggagaacgggaatatcttctatgtatgtaggaaaagatataagaagtacagcctggcaaaattttaagggaaaactacccgagttttttatatatcggaaaattctcactcagaatgaaagaaatcgtgtaaattcctatctggctgtaaaatatgcagttacaatgccatatacagaatactacagttctaaaagtaaaaagatatggaagcaggatgattttactgattatcccgcaaacattacaggaatcgccagagataaatactcaaacttataccagaaacaggcaacaagttcttcggaaaataaacgactaataattgcggctaaaaaattagcggtagacaataatagtaatgatgccgattttcccgatcaaagttttcttatgtggggagataatgaagagcagctattactagatgctccaacttccggatatcaactatttaaaaggaaatggaagacccgattttcaacagaaacttctcaaacgatacctgctgaagttgttttttctgttaaaaatatacttactataccagcagataaaaagttatggttgtttattgataaaacaggacaggggaattttaattcttctaatgttgaggtgtatcctatggattatgtggatacagatcaaaatgttcattttaataatatcatttttgatcaggacttatcagggacagatgttttcacttttggtttaggaaataaaatactatcaattaatgagcttttgcagcctacttgtacacagaagaaaggaacgttgaatataaatattaaaggaggtaaagctccttatcatatccagttaacaggtaacggtgtcaatcagaattttaatgtatccacagcgcagttatcttttcctgatctgggaataggaacttatcaactcgtgataacagatgcggacggaaatgtcattaatgaagattttacagttaatgactttaactccatcaatttagatcttggacctgatgtgacaataagtgcgggaggatctgcccattttgatgcaggtacacagatttcagatcctaatgcaacctaccaatggacttcggataacggattcaccagctcttcggctaatattacagtttatgaacctggaacttatacggtaacagttaacacaccggatggatgtacgaaaaaagatactgtgaaagtgacccgtaaaagagaaaacggaatagtcctataccctaatccggtacctaaaggtcagttatttaccataagaattatatcggatataaaagaaaatgtagatatcaagatatatgatgcttcgggaaggcttgtaaagaccattcaggataatggaaaagactactatgaaattaaagattcgcttttagtagagggagcttatgtaatcgttgtgaaaacgacttctgaattaaaagtgtttaaacttatcgtcaccaactagtcactaattaacaatctattatagataaaaaggaattaaacaaaaactaattgcctgaaattctttcaacagtttacaggtaatcattttgttgtagaaaagcatatacacaaatgagaaattcgatattaagtagattaagagaaaatcctaaaattgtaaaagttctggtttttcttacttcatggacacagcttcatgcttacgcaaatacagcgtacttaaacaagcccaaagaaactttaccgggtgcagattttcattattcaactaacagtagctttctgaagaataatgagaaatcttcggcaatcgatactgctttacggaataatatttcgtattcaaatgagaagaatattgattctgaaaatatctacagtccatcaggaaatggaaataaaacgttgattaaaagtcaaaaaactattattaatcaaccggtatcgggattttatatttctgatataaaagaaggaattataggaaaagactctgaacatccgatagatcagatatatgataacatatttaatgttacagtcaatgaaaaaatcagatctgataaacaatatagcttggaatatgatctttatggattaaaagattataagcaggtaagcaaagttatcaatgatgaattggctgtaggaggtcaaaacgtagaaaaaacaacagtttggacgcaccaaacagagccggtaaaagcaactgctgttaaagaaggcaaaaatattattgtatttacaattcctaattcttccgattacagctacaaaatcagaaatcttcgtatagttgcttcggataaaaagagtactccttcagaatttgcgaattcatgtgtggggcaaaccaactctaaatatataaatgctcaaagtcaggcagaagaattaagtttaaattcagctaccttaaaaatagaaggaagttctgtgaaaaatactgcagtctattccattactgctctcagagacattgatatgcctgctcttactcctgaaatggtaaatgtaacggcagatcatttcggatatagattcttacctcatggagagaatttttcggcagcggcaaaagtatccatcggatatgataaatctaaaataccgacaggatatactgaacaggatattaaaaccttttattttgatcttactcagaaaaaatggattcctttagagaaagccgaaagagattctcttcaaaaaggcagtaatattattgtatctaaaacaacccattttacggatatggtaaacgggatcatcaaagttcctgaatctcccgagacaggaagttatgctcccaattctataaaagatattaaagctgcgaatccaacagaaggaatcgtttctattgcacctcctgccgcgaacaatatgggaactgttaatacaagtttcccaataaaattaccggcaggaagaggcgggatgcagccttcactttctgtaaactatagcagtgaaggaggtaatggctggttaggattaggctgggatctttctattccatccatctccattgatacacgatggggggttcctacgtatgaccaaaactttgaaactgagatttatactttgggcggagagcaattaacctttaaagtcggagatagttatgttttgcccaacagaaatgagggttttgagaaaagcaggtctgcaaacttggagccggataatacaaaaagattttatcctagaatagagggtggatacagtaaaatcatacgtcacggaaattctcccaaagaatattggtgggaggtaatttccaaagatggaacgagaagtatttttggaaatgatggaactgccaataacccgcaacagtattatttaaaagatgcacaagaaaatataggacattgggcattgtataaaacgattgataccaatggaaattatgttgtgtacacgtatgataaatttccttatacttctacagaaaatgtaatgggtaaaggaggagtggagcactatataaaaaatatagaatacactaaaaatgactctaacacttcccttaaaagctatttcataaattttgaatacgattcccagagatatgatgtacaggtgaatgcccgtctaggatttgtgcaggttacgtctaaaaaactaaaaaatattgcaattctttatggtacagataagataagaagttatgattttggttacaaagaaggagcttttaaaaaatctctgttagaaaccattactgaaaaggatgcaaatgatcaggttttttatgctaatagattggagtattttaacaatattgaaaattctcagtattatggtgaaacggttattgatgcggttactaatgatgcaggaataaatagttcatctctactagggcatggtgactctaaaaatacaacgattggaggtgctcttacatttggaatcgcattagctggagataaaacaggatataatccactaatcaaaaatgcaactgtgggtggagattaccaatatagtgagggagaaggaggaggaagactttctatgacagatattgatggtgacggacttcctgataagattttaaaaacggattggaattatccagatactgtatttaaatatagaaagaagggcccagatatgagctcttttggtggtactctttttacaccagaaaattccaaatcattttcttattcaaaaaactttactaatagttttgggattcaggcaacagcaagtgatatggttttcgcatcagcatcatctggaacctctaaaactaaagattttacatataattattttacagatactaataatgatggtattcaggatatagttagtagtggtcaggtctattttggtagaatagacaatggagttttaaaatatacaacagatgtttcacttacaccaaatcctattaataagggagctgctataagtgctccaagtgtcgattgtaatgatattttggaagattataaaaattccccccttcatgatgttgtgaaagtgtggaaagctccatatgatggatacattaaaattattggatcttttaaattaaagaatttatcaagtactgatggtgttaaaataagtctgcagcattacaagcttcaagctaataattcttcttttattgttccgatgacagtactaaattcagcgaatagtgtttacacaattaatcaaccgtcaatagaagttaagcaaggagattatttttattttagagtaaattcaatagataatggaaacaatgatatagttgaattgccagtaaatatagagtatatatatgcacctttggctaatatatattatttatacaatgattcttccgaaacgccattgcgtcagtttaataatacaagccttgtaagtaataaaaatggaattgggattcctttcaatgtaaatacaggctcaattacaggaacttttgttaaaccaataaccgtaagagatattaatattgacatcctgagaaaacaaaccaatggaaccgtgaacgtaattggaaacttgcaatatccttataataatagtggaaataattctattctttttaatacaggagcgctaacagaaggagatattatatattttcaggtaaaatcgaatgttaatgaacaatgggaaaatttaatttttaataatctaaaacttacgataaattataatggagataacatcgaatttccaatcattccagattatcagttctataatttaaagacaaataatcctaccacttttaaacctcattttgctcccccaacaaatagcacaaattacggactttatgcaaaattatataacaagccgtcaggaaagtatacttttatagtaagatcaagaactacaggaacaggcaattttagctcgccacagattacaacaataaattggacgggtactatgagttcaattcaagcccttgcaattcaccagtcgattacacaaggtaatgaatattatgtagaatgctattcagatgtaacctcagatgagggattagatagtagtgcacccaatatagaagtcgaattgcgagagccagtatattttaatacttctgctcctacagtatttgcaacttacgggattaatgtatatggaaaagataaggataatatttatcaaacaggttcttcaaccaatctttcaaaagatgatggaaggtttggagctatgtatagaaactggggacaatttatttatcatggaggatatggcaatttgccaacttcttgtagtcagttacaaaatcaattgatcgattatggaagtctgtcaattgatcctatgaaattaatcccaacaattaatcccaatgattctactcctttgaacgaaagggtattcataatgatgaatgcttataatggaaaagatgtaaacgatcaggcaaatcaagactatatccaaaagcatatcggattgagtaaaactacatatgttaaaggtttagatatctctacttcaagacttggaatgaatgatatgagtattcttacacaaggatctccaattaatacctcaggagttttcaatgcacctattaaacaatcaaaaactacaaattctaatgggggagtaggtgcaggagtgggtccattggtattaaatacaacaacatctagtggtaaaactattaatatattggattattttgatatgaatggagatggttatccagatgtattaaatgggaattctgtacagtttaccaatatgattggtatgctgtctgcaacatctttacaaggatctaatgataatccccatagaacagatcatgaaaataatggatttggaatgggacaaaactatccgttatcaggaaaatcaaatgaatcaaataataaaaaagcggagaaagcagcagaagctggaataaatttttctgcggggcaatcttcaggcaatgatacttcaacatacagctatattgatgtaaatggagatggcttattagataaggtgaataaaggaggtcaagttcagcttaatttagggtattcttttgccgcgcctgaaaacgtctcttttaatgattttagaaatggtgataccaactcttccaatataggagtaggagcatctattggtggtactataaccagtaatttacctaaaggcataagcctgtttaatgcaagtatatcttttggagctggaaaatcagaaactataaataaccaaaaaacatcattgttggatataaacaatgatggattagctgatcttgtaagtagttcaggaggaaatataagtgttttacttaatacagggaataaatttatttctataccatggaatgcctcttctgccatttcaaaagatatctcacgaggatttaattttaatattggatttaccgcatctgttttgatccctattggtacaacgggaaactctcttaaaatttctattaatccaagtactagtttcggtgaaggagatagtaatgtacaacatcaaatagcagacattaatggcgacgggtttccagatttactaaagtcacaaatagataacaatggtaacttcaacaatgatacagctattgtgaaatattctagtatcggcaccaccaacctccttcggaaagtaaccactccatccggaggaagctgggaagtggaatatgagagagtagggaatacatatgatatgccacagagcaaatatgtgttaaaaacggttactaccaatgatgggtttaccggagataatacattcagccctgatgtttcaaaagttaccattcagtatgcaaatccttatcacagcagaagagaacgtactttctacggttttgaaaaagttacggttaatcagattgacacaaaacagggaggaatttcctcaaatgtaatttacagaaaaaccatccagacttttaataactcgaattactatctaaaaggaaacttactgaatgaaaaacttttagatgctggtgacaaaatctggactgagaaaaataataattacagtatcagaagtattcatgaatatacagaaaatgtaaatggtaacgctgttttacatggatttaatattgatgaaactgttctgacaaaagaaaatgaaaaaacagctaataaatatgcttattttgttgcgcttaagaatacagattctaaattttacgaaggaacaggggttgcaaaaaaatcaacaaaaacaataatagatgaatatgatcaatggggaaatgtcaaacaagtttccgattttggggattttgagatcagtggatcaacgcaggtgttaggatcggatgggattatatctaaagttacttacgaagaagttgctcctgggaaatatttcattgctcctaaaacagtcaaaaatactgcaacaggtattgtcagagaaaaaagagcagaatatgatccatcaactggtgatctgaagaaaatggtgattaaaaatcaaggtgcagattattctgtatatgattttgaatatgatgtgtacggaaacattacaaaatctactggtcctgcaaacagtgcaaaccagagattcttccatcagtatacgtatgatgataatgtgaagacttatcctgtaaaagttcaggacgcatttgggtacagtagcaaaacgcagtatgatttccgtttcggtgtaccaacgcttacggaagacatgaatttgcagccaatgaagtttgcgtatgatgcaaaagcaagaactactgaaattacaggaccgtatgaaatgttcaataatatcccatggacaataaagtttgaatacaaccctattaccgatgcaccgcttaatgcaaccaatgcacagtcttacgcggtaactaagcattatgatccagaatatcaagctagcaccatcaataccatcaccattgcagatggttttggtgaagccattcaggtgaagaaaacgggtgatatttataatgatggggttaaatatattgttgccggaaaagtagaatcagatgctttcggaagagcgttaaaaacatactatcctacaacagaaaacgtaggaagtggaaacaccttgtacaatgcttctgtggatactactgagccaacaattaatcagtatgatgtattggatagagtagtgtatacaaaactaccgggagaaaacctgttctcaaccatagaatatggctttgctgctgatgtacagggaagacagatgtttgcaaccacctttaaggatgaactgggaagcattaaaaagtcttatacagatatcaaaggaagaacaacttctgtctgggaagtttcgaacaccggagatattaaaacaaaattcacacatgatgcgatcggacagatccttcaggtggaagatgtggcaggaaatatcacgacatcacaatatgacgatttaggaagaagaatttcatacaagcatcctgatagtggcattaccacttataagtatgatccggcaggcaatatgaattcaaaaaccaatgctgccaatgaaattgttaattataagtatgattatacaaggctgaaagaagtaatctatcctgtttatcctgaaaataatgttaaatattattatggagctgcaatggatgcatctgcaatggataataatgcggtgggaagactttggtatcagacagatgctacaggaacgcagtatctgaaatacggaaaactgggcgaacttacctaccaacgccgttctgttgccgttccggatgccggagtatattggtttggaacttcatgggaatatgacacatggaaccgtgtgaaaaagatcacctatccagacggagaagaagtgaaatatacctataacaaggcgggtaatcttttcaatatgagctctgtaaaagatggtttcagcagagacattataaataagctggggtatgataaatttgagcagagagtgtatcttcagtatggaaacggtacggaaacgacctatgaatacgaaaccaaccgcagaagactgcttaaaatgtatgctaaaaacagcaacagatactttatgcagaatacttaccagtatgatgtggtatcgaatgtaatgcaggtacacaacaacgcgcctgtggtacagggattattaggaggaggaaccaactatgcctatggatatgatgatctgtaccgtcttacgtcttcatcagggaactggagagggattaaaatgaaagaaacttatgattctcagggtaatattatttacgttcctacagaagaaagacaccgtttcaccgtagggatgacgtatgataatatgcataacatcatgagcaaaactcaaaagcatgagtgggtagaaggtactacttctaacaactgggctactgttgaaccgacttcctaccgtctgaactataaatatcaggatccttcgcatccgcatgcgccatccagaattatagatgaaccgaatgttgtcccgaatgctacatgctgtaatccggacgatccgggagtgaagtttcaggattatcaatatgatcctaaaggaaatcctacgaagattctgcagcagacgtgtaccaatcaggaagaaaaaacagtgtatttgtgggacgaagaaaaccgtttacgttttgtagataccaatcctacaacaccggaagcagatggggcggcaatttatacctatgatgcaggaggagagcgtattataaaagatgttctgtttaaaggaaaaataggaaaatataacagcaaccatatagaagtaagtggtgaaaccattcataaagcggcgatatatccaagcggactcattacgcttaatcttacctacgatttgcagaatggaatgttacaggagccaagctacaccaagcattattatgcgggaagccagagaatacagtctaaaaacggaaacagcggaaatgtaggagcatttgattgtgcgtggcttattatcccgtttggaggaacaacgcctccgattaatcctgtgaatgtttctaaccagatcttacagaccgctacccaaagcaatctggttattatgcagaccaataaccttaccccgccagtaaattatgggcaaaatggaggttatgccggaaattgcgtatcttcgtatgcaagcaatgtggaggaaaaggaaatctattggttccatccggatcatttgggcagcagttctttcattaccggattagatggcgaagtaacccagaatatggagtatttcccaagtggagaaatcttcgtagaaaaccatatgaatgatggcttgaacagccagtacaagtttaatggtaaggaaatggattctgaaacaggatattattactatggtgcgagatattacaatccaagagtttctctttggttgaacgtagatccactagcggagaagtatcctgcattctctccttacgtgtattgtgctaataatccaataagatatattgacccagatggaaggttcttgattgatgttcatagaagaattgtagagaatgcatttaaacagtttatgtttaatagagtttttccatctaatgatattcaagcatttgaaagagcaattgtaggtggcggagtaagtccttatagaggtagcgttattgctcctgatgttagaactttgaagacttggcaaggaggggaagggatgcctagcgttgatagagagcattttgataacatgaattattcgcaaataatgaagaattttaatgtagtggataatggtattgatcagttaatttctcaatataaaagaggaaagattaatgctactgctttgggaaatggagttggagaatattttcatgccgttgcagatttttattcacattctaattatattgaattatataaacaaacttatggggaatcagctcttcttgaggatattccgacacttcaagttgctttgtcaagcaaaaaatattctgcttttgcaaaattactaaagagtgatttacatacagggagttatccaggaaatggaaaaggttcacatgaagaaatgaatcatgatctaggagcgggttctgcatattggtttactcctgaagttattggtaaagaggttaattggaattctagagcagcggaagctgttgccacaaaagcaactgtagaatatgtgggaaaggtagaaaaaagcataaaatgaaaaaggcaataattataaccataaattttggtatttatttatacttaaattatcaaatactttcatctaatccattatattattcaggaaaggatgatggggtaagtgcaaggtttattgctcatgtttttgtaatatctttatcgtattttctgcttgcaaataagagtaggtattttattttattattaggtgtttttatttctgtatccacttttgtattgtcgtatttattattttacaaatcaaatttccgatatggttattttcacctctttgctatcctattgtcatttggactttactatttaattgaacaaaaatatctaaatgcaggaaaaaaatagctgaataaattgttttccccttgctagcacgaacgtctcgctcgtgtctgtataaaaaatcgccaccttttatgggaggtcactgaaaaaccttgcatcttacgacagcctatttatttaggatgaaaaataagagcttattacaagatttaaaaatccgtaataagctttttattttattgggaagttgtttttttgnnnnnnnnnnnnnnnnnnnnnnnnnnnnnnnnnnnnnnnnnnnnnnnnnnnnnnnnnnnnnnnnnnnnnnnnnnnnnnnnnnnnnnnnnnnnnnnnnnnntgctatggagctaagggatatggttacagctgtattaatcatttttgcaggaggaaatccagacaaagtttttaaaacttaaaagaggtcggaatttcttccgaccatgactagcaaagccgccgccgaaactgaaacttcaaaattataacagaatttaaaaattattttattgatgatagttattggttgtttgatttttcagtataaccatcaacaaaaaactttcaataagcaacaaaaaaatgaaaatcacagaccatataaaaaacgcaaacggaaaaacgttattctccctagaagtcgttccgccgcaaaaaggaatcggaattgaagatctttacaaaaatattgatcctttaatggaatttaaaccaccattcattgacgttacgacttccagagaagaatatatttacatcgacaaaggaaacggattaatggaacgcagaattacccgaatgcgtcccggaactttgggaatctgtgcttcgattcagcataaatacaatgtagataccgttccgcatctgctttgcggaggttttaccaaagaagaaacagaatatcttctggtagactgtatgtatctcggaatcgataacgtgatggctctcagaggcgatgcgatgaaagggcatcagtattttgagccaactcagggaggtcacggaagtgcaatggaactggttcaccagattaacgatctgggaagaggaaaatatctgcataatcaggatgaaatttgtgatgagcataataagttctgcatcggcgttgccggttatcccgaaaagcacatggaagcaccttcaatgaattatgatctgaaatggctgaaacaaaaagtggatgcaggagcagattatatcgtaacccaaatgtttttcgataataaaaaattcattgaatttgttcagaaagccagagaaatgggaatcacggttcctattatcccgggaattaaaccaattgccacgaaaaagcatttgaaggttttacctcagatttttaaaattgatcttccggaagatttaataaatgaagtcgaaaatgccaaaaataatgaagccgtaaaacaaatcggaatcgaatgggcaatcgcacaatgcagagaattgctggaattcggagttccggttctgcatttctattcgatgggaaaaagtgataatattaaaaaagtagccggagcgctattctaataaagtgaaaaatgaatatttgagagttctgcagaaatgcagaacttttttataggttttcggcggcgaagccgccgaaaacctataaatcacaaaacaggatgtctctcaaactccttattcttgtcaaaaagataacggtacgtcgctaattttcgggtgactgttgtgtcaagattttccgcaatcttaatcattttaggattgaaatctccgatccactgcatttctgtaactttaaaatccgtatgttttctcaaatgttgcgttccttcccagatcatgtagccttcaagacctttcctttgccattccggaacaacgccgaaaaccagacccaccattttttcattcttcttaaactgtttaatccagagaaacttcagcttttcccagatcccgaattttccgttcagatatttaaaccactgattcgtatccggaagattcatccacatcgcgatcggtttttcattttcgtaaacaaaccatgaaatatgttcattgatgatcggtttcatcgttttaaacattttcagaactttagattcctgaagacattttccttcgccgtgtgcagcccatgctttattataaatttccgtaaaatctttggcgaatttctccagattatttttcgtcatcggttttgcggaaagatctggattcttactgtgtttggcgtgcataaccgtaaaaagtctcgaaacttcggcaaaaataggtcttgaaaaacaaagctgctcaaaataaattttaaacccgtagttttcaaagagatctttgtaataaggaaaattgtaattcattccgtacagaggttcgataaaaccttcaattaccaatccccagaatttgtcgcgctccccgaaattaattggtccgtccattgcttccattcccctttcctgaagccagcttttgcaataatcaaaaataaaatttgcagtttcctgatcgtttacacagtcgaaaaacccgattccgccggttgactgtttttgctgatacgtttcgttaatgaaaaccgcaactttgcctacggttttattttctttatttttaaacaaaaatcttgcacattccccgtttttaaaaaacctgtttttctgaggattaaaaacatcttcgatatcaatatttctgggtcttatatagtttttgtcttttcgataaagccttgccggaaattctaaaaattccttcttctgggattcgttttgtacttcttcagcaataatcatggtgtaaaatgatagtgggggcgaaagataatgtttttcgcccaaattaaatatgacgaacagattttatccgtatttttgtgcaaattaaataaaaatggttgattttacggataacgacgatgatattttcacaggaaaagaacatacgcctattagggaagatgcttttgataaatcaccggaagaaaagatagaaaaaattaccgaactttttggggagatcatggaaacgctaggtttggacatgaccgacgattctttaaaagactctccgaaacgtgttgctaaaatgtacgtaaatgaaattttcggaggacttcttccagaaaacaaaccgggaatttccacattctcaaataaatacaaataccgccaaatgttggtggaaaaagatatcaccgtttattcgttctgtgaacatcacttcctgccgattatcggaagagcacacgttgcttacatttcgaacggagaagttataggtctttcaaaaattaacaggattgtggattattatgcaaaaagaccgcaggttcaggaaagacttacgatgcagattgtaaacgctttaaaagaagctctaggaacaaaagatgttgcctgtatcattgatgcaaaacatctttgcgttaattgcagaggaattaaagataccgcaagttctaccattaccgcagaattaagcggaattttcagaaccaatcctatcacaagacaggaatttcttcattatgtaggaagccatgcgaaattggattaaatgaaaaattgtactatttttaacaatgttaaacgatattaaatatgaactccaatatatcctttcaggaaagagcgaagttaagtatggaaatactatccaaacaatcgccggttaccttagaagaagccaagaaacaggcaggctggcttcaaaagaaaagtatttcaaaagaaaagaaacattagagttaatcgattggattaattctaataacttttggtataatacgatagattttaatctgtttgtatcagaaggagcggagcaaaaagtatatttgaaagatgatagttttgttttaaagctgaatgattctatttactacgaatcatggctggattactttcataatctccttttaaataattatttttttccggatacagcatatgaattaattggattctattttaattcagacagtttatatgcagttgttaaacaaagatttgttaaattagattagttaactgatctcagagaagttaaaagttttcttggtaataatggatttgaaaatataagaaacaatgattactataactcttccttaggaattattctggaagatctccatgacgaaaatgtcattacacaaaaaggagtgttatattttattgataccgttttttatattaaacctgaaattttctggaagtaaattataatgataaaatttaaaaaagtttcatacaagatatttgtaacaaccattatttgttgttgctgtacctgctgctgttaaaaggttaaaatcttttaattaataaactttacactaaattttaaaaatcattaaatcaaaataaaaaaatgcaattaaaaatatacaactcgcttgcgggagaaaaagaaatattcaagccgattttagcaggaaatgtaggaatgtacgtctgcggaccgaccgtttacagcaatgtacacttgggaaatgtaagaaccttcctttctttcgattttatctacagaagcttgatgcatttgggttataaagttcgttacgtaagaaacattaccgatgcaggtcaccttaccgacgacggcgacgtgaacaacgacagattcgttaaacagactcgtcttgaaaagttagagccaatggaaatcgtacagaaatacacggtcgattttcataaagtgttggatatgttcaatttgcttcctccgaatattgaacctactgcaactggtcatatcgtagaacaaattgaacttactcagaaattaatagaaagaggattcgcttacgaaagcaacggttctgtgtatttcgatgtcttggaatacaacagtagaggcttgaattatggtgaactttcaaaaagaaatatagaagaactttttgccaatacccgtgatctcgacggacagggtgaaaagaaaaatccgcaggatttcgcattgtggaaaaaagcttctccggcacacatcatgagatggaattcgccatggggagaaggttttccgggatggcatctggaatgtactgcgatgagtacaaaatatttgggagaaactttcgatattcacggaggcggaatggatcttaaatttccgcaccatgaatgtgaaattgcacagggaaaagcgtgcaatgatgcttctcctgtaaattactggatgcacgccaatatgttaacgatgaattctcagcgtatgagcaaatccaccggaaattatattttgccaatgcagttggtgacaggagaaaacgatttcttcgaaaaacctttccatccttccatcgttcgtttctgctttttgcaggcacattacagaagtgttttagacatttcaaatgatgccatgattgcgagtgaaaaaggatacacgagattgatggaagctattaaagtactggacagcatcactccgaatgacgaaaaacaatccggtttcagtcttgaagaatggaaaaataaagcgtatgatgcattaacggacgattttaattctccggttttaattgcacatttatttgaagcggtaaaatatatctttgctttaaatgatgggaaggaaacaatctcaacaaaagatttagaggaactgaaatctactttaaatgctttggttttcgacgttttgggacttcagacgattgaggaaaacaataatgaaaaactggatcagaccctgaaagttttaatcgagttgagaaatcaggcaagaaaatcaaaaaatttcgagctttccgatcagatccgcgataagcttcttgcagaaggtatcgaactgaaagacggaagagacggaacttcttatgttttgaattaaaataaagcttcagggcttttaatatatctcccgcagattgtacagattacgcagattttttacagaatcatccgctaaatctgaaaaatctgcgggagtttttttatgcataatactgtcatttcgacgaaggagaaatctattttcaaaacttagcctaaaccttattatcaaactaaaaaaaattaaaatccaatccaaaaattacgtaacttagtcataataaaatgattaaaaatttaaatggatagactatgaaaaaacatttattccctttatttctgttgttgatgggcgcaaacgcttcggcacaacaggatttttttgctttggtcggaaaagacactcagagtattgttttcaatgatttccgtgccatcgacggaacaagcggaacttccggagaacagattttcaatgcagattcttctgcaagagttttctcacagagcagaaacggcgctgtaaccgaggataaaaatacctacaataacgcgcaggctgtaaatatggcaacgctggcttatgattcttacaataataatctgatctatatgccaatgttttcttccaatatttacgttttaaatgcaaaaacgaaagaaattactctggtggaaaatagtgtggcaagagttacttcatgtgacatcaattctcatgtaacgagaatgacaacaggttatgacggaaatatttacgcgatcaacaattccggaacacagtttttgcagatcagcagaaaaggaaatcaatatgtggttaacgatttggggatcattaaagatgatgcttccaacggaaaaaattctttcaccactattgaaacaggtttcggaggagatatgattgccgatgcagaaaataatttctatgttttttcggcttcgggaaatgttttcaaactttctccaaaggaaatgaaggctaaattcataggaaaaattgccggaattcctgaaaattattcagtaaacggatctgccgtaaattcaaaaggaaaagtagtgattgcaagtgcaaaaggtgctcctctttatgaagtggatctaactactttacaggcaaaaccacttggaggagaacagaatctgcatatttatgatttggcgagtaaatattttgcgaatgataaagccgtttctaataatgcttacgccaatctggatatttatccgacaagagtggatgaaaagctgatcaacgtgaatgtaaatgacaaagctgtaaaaggaaacattacactgaatgtttttgatttgtcaggaaaaaatgtgatgaaacagaatttatctgtaaaagacggttctttaaatcagcaggtttatcttaaaaatctgatcagcggagcttatctggtaaacattaccgacgaatccggaaaagtattattaaacaagaaaattttagttacagaataatctttaactttgtataaagcttagaaaccttttcagacattttgaaaaggtttttttaatgaatatttgatattcaataagttttatttttcaggattataatgtatttttataaaaaaatataaatgaagctatactttaatgtaggttacagtgcgaaagtcggagagaatctgcaattgatgatcaaagatgaaggctctgtacatcagactcatgctatgttttacggagaaaacggattgtggaagtgtgaggtggattacttttccaaaaccatatcatatcactatcagcttatcgatgaaagaggaaatattcttcgcgaggagtttgttccgcatcatcttgcttttccgcacaattacaaggaatttgtggtttttgacgaatggaataataaaaatttccctgaaaactacctcaataataaaattctatataacaagctgaatacattcaagccggaaaaagtttctgtgctgaaaaagcatacgcatttattcagaatagaagctccgatttataatccggactggaagattgttgtattcggaagtacggcttcattaggaaattgggactacgaaaaagcgatccatctgtctcagaccgatttcggcatttgggaaacttctctggaaattcctgaaaacgaatttattcaatataaatattgtctttacgatgcagctaaaggtaaagtaatcgatgtggaaaccggcgaaaacagatttgctctgcccaatcagtcgaaggacgttttacagattgtttcggatcattattttaaattcaaactgtatcagatgtatcacgatgcaggagttgctgttcctgtcttctctctgagaacggaagacggcttcggtgttggtgaattttccgatatgaaaaaactggcagactgggcaaaagaaaccaatctcggaattatccagattctgccgattaatgatacaacggcaaattattcatggacagattcttatccttatgcggcagtttccgtatatgcgcttcatccgcagtatatttcccttgaaaatcttgattttgcgttacctaaagatttaattgaagattatcaggctgaaaagtcagaactaaattcattagaattaatcaattacgaaaagatgatgtttggaaagtggaagtatctgaaagccgttttcaatgaagataaagaaaagatttacaaggacagaaacttcaagaaattcatcaaagataacgagagctggcttcttccttatgcagcattctgtgtactgagggacaaatacaagactccgaatttcaacgaatggaaaacgcataaaaaatatattgcaggaaaggtttctacatttttttcagcaaaaagtaaagattatgatgcttctatgcttcatgcatgggttcagtatcagcttcataaacaattaaaggatgcgattgattatacgcataacctcggaatttccgtgaaaggagatctgccgatcggaatctacagacattctgtggaagcatggacagaacctgaacttttcggaatggattttcaggcaggagcaccgccggatcagttcaccgaattggggcagaactgggaattccctacctacaattgggaggccatgaaagctgatgattacaagtggtggaaaaacaggttcaaagcattggaacagtattttgatgcgatgagaatcgaccatattttagggtttttcagaatctggagaatgccggtttctgcaactcagggaattttagggtatttttatcctgccgttcctattacgctggaagaattcaatgcgagacatattccttttaatttcgacagatactgtaagccatttatcaatgatcatattctctggaaatatttaggcgaaaacagcggaaaagcgcttgaatttatcaataataatcagaacggaacctattcatttaaagaagaattcaatacacagcgtaaattagccgacttttttaagaaaaatccacgaggtccgattgaagatcagttgatttctctttgtgccaatgttttatttttaattgaggaacgaaacggacaggttgtttatcatccgagatttaatgtatacaacacagaatcttacaaatatctttcggattgggagaaaaaatcgatctatgacctgtatcacgactatttcttcaaaagacaggatcatctttggtatgaaaaagcgatggagaaacttccgatgattcttaatgctacagaaatgctgatctgcggagaagatttaggtcttgttccgaactgtgttcctgttgtgatggatgaactggcaattattgctttaaaagttcagagaatgccttcagataatattcctttttacaatcctaaagatgcaggctatctgaatgttgttacggcttcctcacatgacagctcaacgttgagacagtggtggaaagaagatccggtgcttacacaaaagtatttcaatcagcagttggtacagtatggaaaagctccggaagaactggatcctcatttagccgaaattataatgaaacagcatctttataatgactcaatgttagcaattttcccgattcaggagtttttagcaacggataaaaatcttagcaatcctaaaatggataatgaaagaatcaataatcccgcagtttttccacattactggagatacagaatgcatcttaatctggaagacctgaaagagcagaaagattttaaccaaaaaatagcttattggattaaagatagtggaagaatataaatttaacatttgattatcaattagttaataataaattaaaagaagttggatcggaagatttaacttcttttttttatttatatccaaaagatagaagagaaaattcgactatattaaccaattaacgactatagaaatgaaaaaaatattaatcagttttgctttgggtatggcgaccttatcgtttgctcagcagtatccgaataatggttgggaagatgacggctattatcagaatgacggaggatattacagtgatgaagacgatcagaattatttcccggacgactattactacaattatccgcaggattattatccacaggattattaccagaccaattacaatgattacaggaacagcattataagcatcaactggaatggcttttttgctcaaaacaggctgaatcgttggcagatagaccagatcatgagactgaataatctgtacgtaagtttctctacatggaataatttctacagatacaatccggacagatggtattatgacagattctatgcattggaaagaattatgggaccgagagttttcgtggtattccagaataattattacagaggatacagtcctgtagtttattttcagaattaccgaagaactcattatgcaggaatttgcagaccgataccgcgttacagaaatataaacatcaatatctacagagtagacagaaacaaattccgcagatatgataatccgacctttaatattgtaagaggaagcgacagaccgaacaacggtttccgtggaggtgtaagagacggtaataacggtggtttccgcaatcagacagaaaacagaaacaataatccggttttcagaaatgataacggagtaagaaataacggaggcttccgtggcggaaatgaagaaggaggtacaagaaataacggaagtttcagaaatgaaagagcggagaataacagcggaaccagaggtggcggtttcagaggaggagaagtaagaagagaagaagctccgagacaggaaaataacggaggcggtttcagaaataacggtggtttcagaagaagtgaaaatgctgctccgagagaacagaacagaggaggagaaagcagaggaaacagcggattccgaaccggatttgcaaagaattaattttcatatattatatttaagtggtgtgagggcagatatttatgatctgctcttttttttattttatgattgaaaaattcatgttaaaatttaacattttttatgaggtttttcttttaactttcgttttaactaataatcaaaaagatgtataacaattaattaaagatttaaaaaaatgaaaaagttagttttagcaatagcatttatcggaatgggaagttttgcaatggcacagcaaacaactccgacacctcaggacagacaggctaaaagagcggaaatgaaagaaaaatttcagcagagagagcaggaacatatggcacagatgcagaaagatttaaatttaaatcaggctcagatagataaaattaaagcacttcacgaaaaaagaaaagctgaaatgaaagctgattttgagaaaaacaaagatcagagacaggcaaaaagaacacagatggatgccgatatgaagcagattcttactcctcagcaatatgataaatggcaggcggacagaaaagcaaaaatggagcagagaaaagtggcaatgaaagaaagaggaatgaaaggcggaagaatgcacaaaccaatgaatacggcggctccggatgcaaattaaatagtttataattttgattttttaatgtgtgagaggacggaatttattctgtcctttttcattaaattctattaaaacttttgatttcggggttttattccctaattttgactgaaaatttacgaattatggttagcgaaagaattgcaaaattaattaacgaacaaatagctcacgaacaatacgctgcacaatattatctttctatgtctgcatggttttccggtaaagatctggatgggatcgccaattatttccgtgtacagagcaaagaagaattaatgcatgcggataagatgttcgactatttaaatgatgtaggcggagaaatcatcattggtgaaatcgcaaagccaccccacgaatttgcaaacgcaatcgacatttttgaaaaagctttggaacacgagaaaaaagtgaccaaaagtatcttcaatatcgtgaaaaatgcaaatgacgaaggtgattttgcaacaacttctttcctgcagtggtttatcaacgagcaggtagaagaagaagcaagcgcatctcagttggttaccaaaatcaaaatggtaagcgataatccatccgctttatatctttttgatcaggaattggcgcaaagagtttttgcaccggatacaacagcttaatatttattttacagcataaaaaacgaaaagagcagaaatttctgctcttttttgttgataattatatttaattcttaatgttttactatcagatggatagattttttctcagaattagcgagaatacttactacgtaaactccattcggaagatcgttgatagaaaatacttttctgctgattccttttcttaaagattcggattctgaaatcgttttaagtgtttttccgttataatctgccaatacgatatttacttttgcatcttcagccagattaaattctaaagtagcattagtagaagctggatttggagataatttcacgtcctgtaaaatggcagactgagcttttgcctgtctgcatttgtcgtcgcagaactgctctccgtctgtaggttctttctgattgatggtaatcaggaaatgacaaacacttccgtacaactcatcaggacttcctgtaatgatttgagtcgcagcaaaatcatagctttccggtgaagtaatgtttgtgttttcctgttggaaactaagcgcaacagggaaatattctcctgctttcagcctgatatttttaagggaagcgttctgaagatctgtgatgataaattcatgttcattgtaattaagcacctgcattccttccattacttttcctccgttttcccatctttcccaggctatatcatttagttttactacaatatttcctacgcttttgaaaggcacgttagaatcttttaccaaattgaatttaacatcaaaattcttttcaaaatcaaaataatttccgaagaagaatcctgattttttagggaaagttccgcttaagcttaccagtcttgtatttcgggttacaacgttattgttattggtaacattaggctgaataggagcattcggacccggattttcgttgtacatcggatctcccggagatacaattcttcctaagaaacaaacctgattatcggtaagacctccataaattgcaggatctaccggattccatttggcatcaataatgtaagtttgtcccggagccagagccggaattttgaatccctgacctgttgcatacgtattcgaagcattaaatcctgtatacggagtagtaagttctccacctgccgaaaaaccgttaattaactgtattccgttccatgagtttggccatgtttcgccggtagatcccatcgtccagtataatcttgcaaaacttggggcagaagttgtacagccgatattgcgaactctgaatctcatcacgttaaatcctggtccaagatatcccggatcctgatgagtaaagtttaatagagaactgttggtacgtctgttccagatatcaggactctgataaatatttgcccatgtcgtcgcagaagggttaggttccagaccgatatccgcagaactgtcgaaagctgcaagactgaatgttgatttagctctttgaactgccgcataagcatttaccaatccatatcccatctggctattccatgttccgtttggtcttcctgaagtggaggcataagcataaagatctgttcttaccttttgagcagtctgttctataatatctcttacctgttgagcggttaaacaagggtttgcagataaaattaaggcagctacaccggcaataacaggacatgcagaagatgttccgttaaaattaggagtatagtctgaagcattataaccattgcttccctgtctgtctgtggtaggcattttcacaccgggagccataatgtcgagctgacttccatagcagcttccccatccttctccgtcacatgagcccggattttttctttcaccacaaggacttaatgctccaactaccaatatctgtggattccagcttcccggatatctgatcgtggtattgttttcattacctgcagcaaaaaccacaaccatcccttttccgcccctgccgtttaccaaagcgttggtaattccgttttcgattatggtagaaggtgcatatcctccccatgaattgctgattacatctacgccatttgctgtagcccagttgaaaccattagccaattgctgaggtgtatcagcaaaagtaagattaatacttatggaaattaattttgtattgggagccacgccgctgattcctaaattattgttttgaacggctccggcaattcctgcacaggcggtaccgtgacttcctcttaccacagaaggtgaagtattggtctgcgcatcatatcctgatccgaaaacattcgcggcaagatccggatgattcatttcgaaaccatgatcaaagattgctgttttcacgttggctccggtggataaagtccatgccgattcagcttttatatcaattcccgcataagaagccccaaactgtcctgtatttttcagtgaccactgattgggataagaaggatctgccgtagcttccagattgtgatacataaattccggttccgaagcttcaaaagatcctgtttcgtaaaataaagcggacatttctattgccgtaggaagagtggaatttttagaacatgaaatcgtaaaccaaagtggcatatattcgttatagcctaatacttccacattgtttttctgtgctaattcattcagaagtttgaggtcattttttgatttcagttttacatagaaattattagacattcccattttttgtttttcaccgcttataaaacaaggtgatgcaaccagtacattgggatttttgtttttttcagcgatattggcaatgtattgttcgtctgaaatattggcgtcggattcaatttctacataatagctttttttgtcgcttaccacttttttcccatcattcaaaagagaatttttggtaaaattttcaacaatcggggtggttgttttcaaatttcttacaacatctgtattggcagacgaaatggcaattgatgatttgtctaattgaaggaaatattttttccctttatagtaataaaaatacttagaagctgtttgtgcgcttatgctcaggatcatgaagagcgataagatgaatgtaaatattctaattttcataatactttgtttaatggttaaaattttttttaatgatctggtttttaatctaaagtggtttgaatagaatttctggcataattcatgtatttaagattaatagaattttatttttaaaatactaatagtcagtgttttaaattatatcttattaaaggtaaatgaattggttttaaagtgccagttatagtaattaactgtcatcagatattgattaagtgtgatgaaaaacagaataagtgttaatttatacttaagaaaaatagatcgtaaaacgtctacggcggcaccaaaggtgctgccgtagacgtttcttatacaatatttgagattacaaataaataagctgcgttttcaaaacctttcttcccagcttttccagaatatttttataatgggcaatttgtctgtcatttttctcagattcttcaccggttttaaagtctacaataacgtagccttcaggactctttaaaattctgtccggacgatacacgctgctttcaccgttttcggaaatcatgatatctttttcattgataacctgccatttttcatcaaaaaattcagcgttattttttataatttcttctaaatttctctcaatttctgcgctttcctcaatggttatctgaccatccagaacgtagcattccagaacttttctgatgtcttttgccgtattgatttgggataataattcatggacaaaaagcccgattcttactttttcaacccgtacctgataattttttgacggagtggcaatcttaattgacgtatttttttcgttgatgttttttaaattctgaatatccttcgtttcaaaatgggaggttttatcccttgaatgttttttcagcatctccggattcacttcatacagatcaaattcatccagattttccggatttttagactgtaaaaactccagcaattccagattgttagacgttttattcgctttctgaatataaaaatacaattgctctacaggtcgcgttgtcgcaacgtattgcagacacagcctgtctacaaagtttttataagaattctggagattgaaatactgaatttcctcatcgtacacctcaagatttttactgaactgattaatattaaccgattttaaagcactgtcattgcttgtttcaaaccaattggtgaactcagcatcacgatttttattaatcattgggataaaaacaatcgggaactccaacccttttgctttgtggatcgtcataatctggatcgcatcaatattttccgaagcctgaatcgtgtatgccgaagcctcttcatcccaatatttcagaaattctttcgtacttgctcctgcattttgtgtaaaattgaaaagcatttcgagaaagttcagcaggaaatcggtctccttattttcaacagaaaattcattaatataatattcaacaaagttgtacagattgaatctcgggaaattgtcctgcttaagcttcagagcgtatttttcctgaataaagtgtaacgtttcttcgtgcgtttcaattcctaaaatttccttcatctccaaagtgaaatctttcatctgaattcttcccagtttattcaggtaatacatcatcatgatcagattcggcttattcttaggattgctttcccatcgcaggaattcaacgacggctttaagcgtgttggataattctaaggtaagacctttatcggaaatcgttttaatattcgtttcctcacctttgtaatttaccttcagatttcccagtttttgagaatagctgaaaatatcaaaatttccacggcatagaatcgtaatgtctgaaaatttaaagccgttatccagaatctcctgaatatctttcctcatgctttcagacgtatcattgtaaaaatcctcattcgtaagattttctatcagatttacttttacacgaccttcgatcgacgatttcggattttgttcggcatcagttccgaaaatatttttatgctcttctgctaaagattccgaatgaaatttatacagttcgttattaaagtgaacaatattctttgcacttcgccaattgtcttttaaaaccaataaatctgcctgtttaggggaaaattcctttttgttgatgatatcgagcatcagtttactttcccctccacgaaaacgataaatactctgtttcgggtctccaaccaacgtaaaagaagtattttctgatgaaatcgcatgatctctcaaaggaaggaaattctgccactgtaattctgaagtatcctgaaattcatcaaaaaaatagtgctgaaactgggagcctactttttcataaataaaagccgaaggctcattccgaaggttttcgttaattaaaatattaaatttagaaagcaaaacaaggtcgttttcttcctcaatttttttcagctcatcctgaatgtctttatttacctttaaaggcagaagcgcggataaaattttctcttttttctgggtttctatgtacagccgaataagctgcattctgtaatcaagaagctgatcgagaatttcaagaatttcagcttccttgttttttgattttgccgaagctcctttccggtaattgttcacaacagattcttccgcagtcgttggaaaaggaaaacccggtcttttctgatgataaaagtctaatactttcgtaaaaaatcctccgattccgtttttcccctgtgcgaaatcttcaatttcaatattcctagacctgaataattcgatggatcgtgtagcgagttcaaccgcctgttttttgttttgggcaatttcttttcggagtgtgtctttgatattctcgtaattcgtgctgtcgaaatctttattgtttttaagatgctcgtaatgaatatctttcacaaattcttttgccgaaccgtaaagacttttgttcaggtttattctttcattattttcgagactgtaatccacataatccatgaaagagttggagatcacttcgttttcgccaatctgatcgagcattttatcaaccgcttcaatcagaaaaggttccgcttcaatttccagattgaaatttttggcgagtcccagttcataagaaaaacttcttaccagacgggaattaaaacggtcaatcgttccgatattcagagtagaataattatgaagcacataatccagcattttttttgcgcggtgatgcagttcatcgatcgttattttcagaccttcttcttcaaatgctttctgaatattttttaaatccggattttctgcaaaattatcattggaaaaatttccaagccacgtcagaattctttccttcatctcattggctgccttgttggtaaaagtcaatgcaagaatattcctgatcgactgctgctgattaggataccgaagacagatcattaaaagcctctgcaccaaagcataggttttcccggaacctgccgaagcattaattaccgtataagaattttgcatttttagtggaattcaaagtgcaagttagctaatttttaagtgaaattttaacaattttctgctgctatttaacagttttaaaaataaaattctaaaagaaatcctaaaacacgttaactgtggttaaacttgcagtttaatttaaaaataactttagttttgctttataaaaaataacctgtgaaaataaaactattctttgtcttagcttctctttttttcatcaactgtaatgctcagaattatattttcgggaaagtaacttccgaggataataatgagatgcctgaagcaacggtaatcaatatccggacagatgaaagggttcttacaaaccgcgatggtcatttcatgatttcgggaagagcgggagacgaacttcgctttgtaaaatcgggttatgagcgtacaaatcgtaaaattacccaggaaaacatcacggctcctgtaaatgtaacaatgataagagcggcagaactgattgcggaagttgaaattaaaaaaaacataacgggagatattaagatcgatgctaaaaatctaaatccgccaagaaaagttgaaaaactgaagaacgatctggcaaaatatatgtcgcaaaagtcggctccgggagttttggcagccagaccgggagaatttgtacagcctgtaaccaaaggaatttacagtttcgggaaagttaaaaacaaatgggacgatgtagatctgatgaattatctgcaaaattctttaggagatacctttttccaggagcttcagatcccaaaacctcagatccagcatttcattctctatattttaagaacaggttttgaaaggaaaaatatcctgaaatacggatattgtacagaagcagatatgaatcggtttaaaaatgcagttttgggcagaatttcagcctacaaatcgccgcagcctcaaaataaataatcttatgaatatcagattagttataatcctgctttttctatttgtgaatggtttttcacagcaaaaaatttcgggaaggattacggatgaagatggcatcaatttaccctccgttacggtaatgaatgtttctgcggacaaaaaaacgtatacagccaatgacgggacgttttctattgagatcgcttctccggatgacgaaattcgctttgtaagaaacggttttgaaagatcttccataaaagcactatatggtttaaacaaagagctgaatattaagctgacaagaattgcggaagacattgaagaggtggaagtggctaaaattaccggagatctcgataaagattcaaaagcggtggcgaaaaccgataaagggcaaattgtggaagatgcggtaggattgccgcaacccgtaggaaaaatgcgagaaaaaccggcagaagtgaagcaggttttaattccgattcttttgggaagcctgaatgttcagggattgtatgatcttgtaagcggcgatgcaagaaggatgaagcgccaatacagatatgatgatcttcaggaagacattgcgtggataagaaacagggtagaagacgaatattttataaaagaaggtattcctgctgaaagaatttcagagtttatagaattttcttttgtgaataaaccacaaacgcgaacttttgttagggcaaaaaatttaactggagctttatccagaatggacgatgctattcctgtttttgttaaaagaattaaagaaagcaaaatgccttaataaatgttaaaaaatcttaaaatttggaataagaattgatgcaatagtttcagtaaacagatattaaaattattgtaacaaacaaattcacaaatttttatgaataaaaatattctttcgattgccattgcagcattaggtttcgttatcggtctcggacttttaggaaatgccattaaaaacagaaacaaatctgaaaataccatttctgttacgggtttgggaaccaaacaatttacttctgatcttattacgtggtcgggaagtttttctaagaataattttgacctgaaattggcttatgatgaactggctttggaccgaaaaaccatcaacgattatttattatcaaaaggagtaaagcaaaatgagattgttttttcttctgttgatatccagaaacagttcaaaaattatacagataataacgggaataacgttcagaatgaatttaccggatacaaccttacgcagactgtatcgattgaaagtaaagaagttgcgaaaatcgaaaatctttcgagaaatattacggaaatcatcaacagaggaatagaatttacatcgtcttcgccaaattatttttataccaaattagcaacggtgaaacaggaaatgattgcctctgccacaaaagatgctaaagaacgtgcagaaaaaattgctgaaaattccggaagcagtctgggaaatctgaaaaaagcaacgatgggtgttatccagatcacggctccgaattccaatgaagattattcttatggaggaacttttaataccgcttcaaaagataaggaagcaagtattaccataaaactggaatatcaggtaaattagtttttaactgaaaaaaaatccgaagcatttgaacttcggattttatattttaatgataaacaatatcgtagatttcgtctttaatttcctttagattttcgggttgataattggcaagcagccataaattcaaagagttttttccttcgccataacttggctgaacgtacatttcatcaatcaggctgaaaccgtttttctggtagaaagaatagcgtcttttcgtatcttctgttaaatgcccgtgttctatctccagaacaattctgggataattttcaaaaagatagttggtaatatatgatcccagcttctgacttctgaattcttcaaacacttcaaaatgttctacaaaagcaaaatggctgagttcccagatgattaagtagcctacatttttagcttcgtgaagcacagaaattatctttactttaggatgctgaaatagtggagaaagcttgttccagtctcttctttcatcttccggaaacgttttgcagtaagcttcaaaaatctctttaaccctgtaatcttccgttgatgtaatctgcagaaattccataattataaatcaaaaacattgggtcttctggtgataaaaatatctttcacccaaagtgtgaatgccaatcccagataaattagaaagaaaaatcctgccgtggcaaaagtagagtagatgaaaaaaactctcagtttagaaacaggaattccgagtttggcgcccgttcttgtaagaacgccaaaccattctctttccattttatggcggatattgtcaagcatttgaagattcttttaaaattttaaatccaataccgcaatttaagcaatttttttcttcacaggaatttttaaaatgataaatcaggctttgcgattccagtgccgttttacacttcaagcccagctttttccaatccgtaataactgaatttttttcggagggaaggtttttgtaaaaaaacagaatttcgtctgcaatttcttcgttatgatattgatgataggtgtattttaaaggtaaaatggtgtttaaaataatcaattcgataaaatcgcgcgatacaactttgggttgattgactgatgatatttttccgaaattataacgattattccagtattccgaagcttttacattcttaaaaatttcgaaaagctcccctgtatttttagcatgaatgatttttgaaaataaattctgatgtatgaagtaaagattcgccaactgcgacaaacggagcgtaggaaaattgggtggtcgtaatctcagaaatttaggatgaaatttaagattggaattgttgaatttagccttgataaaatcaaattcccgcttccagattttcattgtttcatcctccggattttccagccagccggaaacaccgaaaaataaagcttccagttgaatttcattttgccggattttattaatgatggtaaaatctatgctttccgcaatttgcctgaaaataaatgcattcacctttaatccgaaagaataagctaaagaatgaaacaaaacggcttcaaaattatttttaaactgagctaagttcatctcaaattctaaagatttctcagccagctttttcaaaacattttcttcatgaaaatgaaccggaattttaccgctatcaaaaatattttcacagggaataaactgtgttccgccgatcagtttttcatatttccacaggatattttcgtcgatatgatcttttaattctatggtaggaatgtttctgtttttcagttcctcaacctcgcaatcgttctgaaaaacgacatgaagaattatattctgatagtttggatcgtgtgaatggttgtgaaagatccagtcggaagattttacatgaagttcgatgtttcctgcaaaagtaatctcattgatctttaccttcgccgccagaaaatcaggaccggaatctgtattccatttcccgaagtctaaaatttcaacaggattgccttcaagatctttgaagtcgaaatgcttgaacactttatagttccagagatattgtagtagtttttcggtcatgggtgtttaatgcaaatatagaataaaaatgatttaaaaatattaaatatttgaaaatcaattaaataagaaaattattttatgaataattcaaaattcataaatcctttcaaagaaaataattatttgcatgaaaaatattaatcttccaaaactcgatgtataaaaaagctgcatccttttgaatacagccgtagtgttttatggtataaacctgttaggttttggtaaataaaaactttttaaatataatgctatgctttggtaagctcgcttttgaaattttcgatggtggttctgtacatttcttcgtagatcggaagaatatttttaaggtcgaattttatcgcctgttctttggcattgactttcatctgcgccagaagttcgtcgttgcttagtaacttaatggtgtagttgctcatcgcctccacatttccgatctcggcaagaaagcctgtttctccctgaatatttacttccggaattcctcccgcattagagctgatgaccggagtattcgctgccattgcttccagtgcggcaagaccgaaactttcctgttcagaaggcagtaagaatacatccgaaagctgaagaattctgtaaagatcatttactttacccaaaagacggatttttgaaatcagatccggattttcttctaagaactggttgattttttccatatccggaccttctccgatgatgataagcttggattttacctttttctgaacgttcttgaaaatctgcaatacttcttccacacgttttacaggacgcaggttggatacgtggatcaggattttttcgtccggattggcaaactgtgttctctggcattcgttgcattcgtcaaattcagaattatcgataaaattcgtaatcacctgaatttcttttttaatcttaaagaactggagcgtatctcttttcagactttccgacaccgaagtgattgcatccgactggttgatggaaaattccacggcgtgtttgtaacttggatgctgtcctaccaatgtaatgtctgttccgtgaagcgtcgtaaccaacggaatatcgttattgtcttccttcagcatctgtttggctgtaaacgcagcataagcgtaaggaatcgcgtagtgtgcatgaagcagatccagtttgtagagattcactacacggtaaatcatcgagctcagcgcaatatcataaggctgatattggaaaagtggataagtctgaacatttaccctgtgaaagaaaatattcggattggtaatatctaatctcgcaggaagtgcgttgctgatgaagtgaacttcatagcctttgttggcaagcgacattccgagttctgttgctacaattccgcttcctccgtaggtgggatagcaaagtatgcctattttcatttattttttttgttttgatgttgtaaattttagaatttacaccttttattttacaattgctggaatgagatccattcccattcctgccttcaaagtatcatttaccagaacaggaagtctgccttggatttttgtttttccgttgaatgcatcggctgttgcgttcatggagtcttcattgttttcatatgaaaccagaacggtagaaactttagaaatatcaatatctttcaatgcataagcacttccgaaaacatttagaatcacattttggtttttcgtaagatcggataatactttttttgaagcgtccgagattttatatggtttgtaagccgtagaattatctttatggaaaccgacaatcactgtggaatttgcaggaatcgtagcaatttcatcagcttttttaatcgtaatatttgaacctaatcgattgacaaacgtctgataaggagcttcttccaacggaacgtaataggtttgttttccgtttaacggaagcagttttttttcatccttcagtaaagtgatcgcatttgaatagagattctgaactaaagttttatgagaatcattatttaagtctgaattgatgttttcgggattcttaggagtgtatttctcaagccctaaaaagtatttggttaaaagaatctttttcacactttcctccactctggattgtgaaatttcgccgctttcaatagctttctgaattagtttttttccttctgcaactccctgtgaaaacagcatgatatcgtttccggctttaaaagccattgcatccagttctccgggtttgtatctgttcgcaacagcgcccatattaagagcatcggtaataattaaccctttatatccaagcttatttttcaacagtccggtaataatgtttttagaaacggaagcaggaattcctttggtggtttccaatgcaggaacatataaatgagccaccataacaccgccgattccctgattgataagagctttgtaaggtgccaattcaacagcgttaagtcggtctaaattgtgagcaattaaaggaagatccgcatgagaatctgtacttgtatctccatgtcccggaaaatgcttaatcgccgctaaaatattgttattctgaagtccgtttgcgtaagctgatgcagaattcaccacattacttacttccgaaccgaagcttctgtttccgataatcgggttgttcggattggtatttacatccacaaccggcgcaaaatcccagttgatgcccattcggtgacagtcttcagcaattttagccgacattttttcaattaaacttttatcctgaatagctcccaaagtcattgcccacggaaatttgtgtgcagttgcaattctctggtatagtccccattctgcatccatcccgatcattaaaggaactttagatttctgctgaaattcatttaccaaagtgatttctcttgccgcatcgtcctgcatcagaattaatcctccgatcttatcattggcaacaatatttcttactttttcaatttcactttctcctctattggtgtaaagtgccacaatgaaaagctgtcccagtttttcgtcctgagacaggtttttataggttttatctacccattggtttgcctttttcaaatcgtctttagaaatatttttaggctgatattgagcagatagttttgagcttgaaaatatgaaaatgaaaagtgaactgtaaataagcttcttcataattttttgaataagaacaaaaatacaattaaaaaaatgatgaaaacaaagtttttgaaatttttggtatatgatttgaatacggattataaataataaacaactaaacttttataaaatgaaaaaatttcttccaatcttaataatggcttttgtaagcttatttatatttagctgtgataataatgataatactgttggtgatggtgatacatatccaaagatgagagatgtttccggaagttttacaagttcaaacggatattcttttactgttcctattaatatagaaagtacagatgtggttttagtatacagaagagacccggctgcaagtaatgcttggcaattaattcctaaaacctattatctttcaggaggtagagaattagattataatgcacttttcagttctcagaatcttgaaatttatacagaagcgaactttgaccaagcaacaatgacatcttctgagatgagtacttatctgaatagccagacgttcagagttgttttagttccggctagtcctgctaaaaattcatccactgtagatacaagtgattacaatgcggtaattaaatattataacttagatgaatctaaagtaatcactgttaaagcaaattaagaatatatcttttcagttttttataattacaaaaaagctccggaatttctttcggagcttttgcttttttatttatcgctgtcatcgagtagatgaccaaaataatctttttttgtctgtaaatatcctttactgatttcgtttgccggaatctgcaacggaactcttgagttaagatgaatattgctttcggttacgtattttactttttcaggattgttggtaagaagattaatatcttttactcccaataaattcagtatttcaatagcaacaccaaagtttctgtcatccgccggaagtccaagttttaaattggcttctacggtatcaaaacctttttcctgtaaagagtatgcctttaatttattgatgatcccgatgtttcttccttcctgacgaaggtaaatgataattcctccattttcatggatgtatttcatcgcagcatctaattgctgtccgcattcacattttttggaatggaaaacttccccggtaatacattctgagtgaaaacgcacatttacaggtttggaaaagtctgtattttctgcaacgatcgccatatgaggcatccagtcgttttcgttttcagagagtgcgatcattcggaacgtgccgtattccgtaggaacgttggattccgcctgaattttaatcattaattcctaattggttttttaatttctttttacagaatcttctatcgcagaaatgttggtttttaatcttaccagatatctgttcagaacttcattgtcgtcacctttaagattctgtcttaacttttgaatttttttataggatttttcaaagtcttttattgctctgtttttcccttgaagatttcctgcatctatagcgtaaagataattttgcaggctgtactttaaagtagtgatttctgtatttaaagcattgtttttaaactgtggaaaagtagcaataagattggatatttctgaagcatttacattgtcaccaacattaacttcgatgttatttttggctcctttatcagaatctgatcctttggtttcgctataaaaactattggacaacggagaaaaattgggtttttccgttgcgcaggaagatattataattagtagtactccaaaaaaaattattcgtttcatttttgctgccccttttgataaaggattgggttaagactttcatcattgtacattttcatttgtttgtacactttcatcttaacatctccgttctcgatatcagtaagcaactgatttatagaagtggaaagatcttcatgctgggtaagaagaacatccagtttggctttacaagctgctctgtgctcttctgaagcagattctctataggcttcctgcgacatatgatatacctttaatgccagaattgataacctgtctaccgcccatgcgattgtttcggtattaatttttgcatcaggtttaggagtaatattttcaaactttttcagaaaccagctgtcgatgaattctaccagatcagttcttttctgattggaagcatcaatagttcttttcagttgaagagcttcagtgggatctatattttcatctctaattatatcttccaaatgccattgaacggtgtcaatccagtttttagcatacaaaatccgttccaaagtatccttttcgaacgggttattaattagagtgttaacgtcatcagacacgtgatagtcttcaatagcctgattgaagactttccatgcagtctcagtaaaattcattgagtgtgaagaattgtttagttgctcgaagagttgttgtttgttgtcttattttcagaacccggtttgtcctcttcttttacagcatctttaaattctttgatacccgaacctacacctctcattagttcaggaatttttttacctccgaaaagtaaaagcagaatgatcgctacgatcaaaatgtgttgccaagataatgacagtattgttaatgtattcatttctaaaatttttacaaagttagtctttttttaataagaaacccaacctaatggatctaccggagtacttccgttccatacctgaaaatcaagggtataggttccgtcaaaatcctgtcctactactccgaccggtgttcctgcagaaacctgctgtcctttggaaacacttacgccggaaagattggaatagatggtaaaataatttccgtgtctcagcataacggtttttgttccgtcgctgtttgccaatactgaagatacagttcccggaaatacagattttgctctggttccggaaggtacggagatttttatcccgttattttcttcatcaatatttttaaatacaggatgaggatgtctcccgaaacggtgcgtaatctgcccgattctgtctgctggatatcctaatcttcctttattgtctgcaaaattacttcctgcaacagtagtaacgccataattggtcattgctttgctttccgcagcttttttgtcatcctcttttttctttgctaaagcagcttctgcggctcttgcggcagttagtttatcagatgcttctttcgcttttgctgctgcttcgtctgatgctttcttcgcagctacttttcttgcctcatctcttgctgttgcttcggaacgggctgcttcttcattacgttttctctcttcttccgctcttttatcagctaattctctggcttttcttgcttcaacttcggctgccagtctttctttctccaaagcttctgctcttgctttagcttctgcctcaattcttgctttttctctttcggccgctatttttgccagacgtattttttctgcttctgctttttttcttgcttcctcttctgctttggcaattcggatttcttctgcaataatgcttctgatctgtccttccaaagctttagactgagtctgcttctgtcttagttcagcagtaagtttagattcatttttcttaaattctgcaacaagctgctccttttgagctctttctgcatttatcgttgttaaatctttttgctgactaaccaataaattggctttttcttttacagagttttgtcttcttgcaatcgtctgctttattttttctgcagcattggtaatttcagccgcttttttatcctgataatctgaatattgctttaaatactgaactcttcttatcgcttctcctaaatttttagccgaaaggataaacgttaccttgttctgtactcctttatttttgtaggcatttaccaaaaccttggcataattgtctcttaaaactttaagatctttattctgacggttaatttctaactgacgcagatagatatcgtcctcaataaatcttttttccttttgggtattggtataaactttttctcttaaagccagttttttattaacattatcaagataagcaacagaaagtttagattctgttcttgtctttgcaaggtctgtatttatttgtgcaatttgttttttaagttcagcattttgcttttgcagctgctcttttttctgattctgcccttggtggaatccgaacagtaaaatacctattaaaaagctaaattttttaatcattgaatctcaattttcttataactagatggaacagaataaggtgtttccatcctcgaaaaatcaaatttcgtattttctattaaaatctggctgtttttacttccttttataattattttaacattttttggcaactttacattatttggttgaagctcccaatcactatatacgatttgcatggcatcattggatttagcatctctcaaatttactattgtaagatcaaaatcatccgaatattgcatcatgattttatattccctttcaatattttcggtagaaattttgatgttggaaatagattccacaagataaccgtcactattctttacaatttttgcatttctgtcgcttaaagtgaaaaatgttcttccttctaaaagtttttcgagatttttatagtcgataaagttaacgttcagaagattgtttaaataatcaaaatcggaatcgatgtagtttttgttgtatttatccatcgctttaattccttcaggagtaattaatgctcttgctgcattaaagaacagaaagtctattcttgaccatatttttttatcggtttcaatataaataactgcatccagcggactcacttttatgttgtctgcggttattttactggtgattttaagatattcaaactgtggatgaagataaattttctgataaaaatccattctgtctccaacatgattttcttttttgtcaggatccttcatatcattcacaacgagactgtcaacattctgattttgttgcatggctgtttttctggatttacagttaaaaagaaatacagttaaaataagtaatggaatccactttttcatgccggaaaatttgataagttgttgcaatattaacgccaaaccacacaaaacattttgtgtggcttgaagataatttatttatgttaatattttatattttcgaaaaattatttagacaaaaaatccagaacggaataatctcccagagaaatttctcttgcaacgccaaaatattgtgcggaattaccaatcattgaattggaaaggtttccatggttgatttttgtattttcctgaatcagtgagttttctatatttgaattaacaataattgtgttattccccaaagaaactccgggacccacttttgagtttgaaattttcacattttccccgataaagcaaggctgaatgattaatgaattttcgatctgcgctgaagtcggaaaatgagacattgcatctctttcgtattcaagaattttgctgttggtttctacggttgcgtttttgtttccgcaatccatccagtcgtttacttttccaagcgtgaattttgctccttttgttctcaggttttccagtgcagtggtcaattggtattcacctccgtttttaatatcattgtccatgatataattaatttcatccatcagtttttcggcactgttgaaataataaataccgataatcgcaagatccgaaacgaaagtctgaggtttttccacaaaatctgtaatgaaaccgtagttatccagttttaccactccgaaagcagaaggatcttctacactttttacccagattaccccatctgagtttttatctaaaacaaaatctgcacggaataaagtatctgcgaaagcaatcactacatctcctgtcatggactgttctgcacatttaatggcatgagccgttccaagcggatcattctgatagtaaatacttccttttgctcccagtttttcggcaatctgaataagagatttttcaatctcaggaccaaaatctccaatgataaaagctacttcttcaatagtttcccccgcaactttagcaatatcttccaccaatctttgtacgatcggttttcccgcgatcggaataagaggttttggtacagtcagtgtatgtggacgtaatctggaaccgcgtccagccataggaacaataattttcataaattatataaatatgtttttttgttagttctaattttttataaatatagcaataaaacctttgagtgtgatagtattgccaagagttttcaagttttgtctggtgcaacgcagaatccggtataagcaaagtcagagccagatttatcgtttgatttttgataaaagcatctctttttcggagtaaatgaggatacctgcaaaagttataaataaggcattactcattaaaatatcataattaaaatatttaacaatgataaagctgaaagctcccaataatatcagaaagaatgacatttttttcattctgtaagggataggataatatttttgaccaagtaaataagagacgatcatcataatagcataagccccgaaagttgcccaagcagagcccaacatactgtgataatactttaatgccaaaagattcagggcaatatttattccggctccgaaccatgaaataaaggttcctacactggttttgtccgttactttataccatgtcgaaaaattataataaattccaaagcaaaggtttgctacaacaataatcgggatgatatctattgcaatccaataagactgattggggataaatacacttttcagccaggaaatattagcgataattcctaaagcaaccacacaggcaaaaaatgcaaaatactcagctactttagcatatgtttttttagcatctcctttatccatttgtttaaaaaagaaaggttcaattcccattcggtaagcggtgacaaataatgtcattagtacagctaacttatagcatcctccataagctcctgcttcttcatcggaaataagacctctttgaacagatttgtcaaaattttcattcaccatgaaagcaagaccagccaacattaaaggaaacgaatatttaatcattctgctaaataaagaagtcacaaactgaaatcttacctttaatataataggaagcagtaataaaaatcctaaggcacttccggctaaattactaaagaaggggaagtctacgttttgatccaatccaaagcttttggatacattttcggggatccagaagaatagtgctgctgtaaaaattgcctgaaacacagattgtacaattcttactgcagagtattttatcggtttattatgaaaacgaagccatgcaaaaggaattaccagaagattgtcaaaaaaagcaatcattgcaaaccattttatgtattccggattattatgataaccagcataatctgcaatcggctgattgaataaataacataaagccaaaaaaagactggaggttgaaaataaaaaccaaaatgaggtattaaatgttttcttctcattatcctcttcagcagaaaatcgaaaataagcagtttcaaagccaaaagaaaggatgatattcacaaaagaaatccatgcatacagctgtgtgaaaattgcaaaaccttcgttgggaattttataaatcaaaagtggatttaggatgaataaaataattcttggcgctatagctccaattccatagataattgtctgtcctaataatttcttatacaacgtgtgaaattttatgcaaatgtaaatatttagaaattgattttttatcggcggcattaaaattcattcataaaccttaattttgaagaactttgtcaaagttttaaactttgacaaagttggaagcatggctccatctctaatttgtaaaaaaagtaaaaatgaaaactttaatcaaaaatgtaaaaatcgttaacgaaggaaagattgttgaaggcgatattttattggataacgatttaatttctaaaatagattcccagatttccgaagaagcagaccggattattgatggcgagggaaaatatcttttaccgggtgttatcgacgatcaggttcatttccgtgaaccgggtttaacgcacaaaggagatattgaaacagaatcgagatcggcaattgcaggaggtacaaccagttttatcgagcagcccaataccgttcccaatgcggtaacacaggaattattggcagataagtacgaaattgcctctcagaaatcttatgccaattacggcttcatgatgggcggaaccaacgataatctggaagaagtattaaaaacaaatcctagaaacgttccgggaattaaattgtttttaggttcctctaccggaaatatgttggttgataatcctgaaactttagaaaaaatcttcagcaatacaaaaatgctcattgcggttcactgcgaagatgaagcaacgatcaaagcaaatacgcaaaaatatctggatgaatacggggaagatattccggtgaaatttcatcatttgataagaagtgaagaagcttgttataaatcttcatccaaagccattgaattagcaaaaaaaacaggagcaaggcttcacgtttttcatttgtcaacggcaatagaaacggagcttttcaggaacgatattcctttaaaagataaaaaaattaccgcagaagtttgtgttcatcatttaacatttaccaatgaagattatgaaaccagaggcggattgatcaaatggaatcctgccgtaaaaacacaaaaagacaaagacggactttgggaagcattactggacgacagaattgatgtgattgcaacggatcatgcacctcacacttgggaagaaaaacagaatgtgtatacaaaatgtccttcaggagcgcctttggttcagcattctttggtggtgatgcttgaaaattataagaacggaaaaatttctttagagagaattgttgagaaaatggctcataatcctgccattttattcagaattgaaaaaagaggtttcataagagaaggctataaagcagatcttgttttggtagatttaaacgaaaactggacagtcgaaaaagaaaatatcctctacaaatgcgcttggagtccgttggaaggaatgaatttccattctaaagtcacccatacttttgtcaacggaaatctggtttacgaaaacggaaaaatcaatgaacagaaattcggggagcgtttgctttttgaagttcaggaataagatcgacataaccgatatcaataggagcgggctttagcccgctttttcattattaataacttgaattggctttagccgaaacttatcccaaagttcggataaagccaattttttattatgaatatttagatcagattcaaactaattaagagtggagacaaaaaaatcatttctcagaaaagcgaaaaccaatcccatgaagattctcaatggagatattttcttcatcggaaaaaacttttcgcagtcttgaaataaaaacatcaaggcttcttcccataaaataatcatcatcgccccagactgctttaagaatatcctgtcttttgagaaccgtatttttattacggataaaaaataacaacagttcagattctctctgagtaagtgttactttattgtcagaattttgtaaagtgtaattgttcggatcgaaatcatagtttccgaccttgtattttgttggtgcagattcttttttcttagatcttctcagaaagacttcaattttaagaataagctcttcaatgctgaagggttttaccagataatcatcggctccgattttcaatcctttaatccggtcttctttcagtgctttggctgaaatgaaaataatgggaatttcagcatctttttctctgatatgctgtgcgacctcaaaaccgttcatttccggcatcatgatatccagaagacagatgtcgaaacttcctctgttaaaagcttccagagcagattttccgtcagaatagcaggaaatatcgtaatgattttccagactgtcctgaataaggaacgcaatggttttatcatcttcggcgtagagaattttagatttttccatgattacacatattctttacaatggcaaaaacagggtagtggtgattccttgatggctgttgttttcaacagaaatcttccagttatgctgttgtacaaccttttttacataaaaaagtcccagtccgaaaccatttaccgcatcgctttttgatgtatttaccctgtaaaatttatcaaaaatatgaggcaggtttttcgcaggaatcccgattccgttgtctttgaactttaaatataaaccttttgcgtcatttaaggaagaaataatgattttaggctgggcttcgcagtatttaatggaattgtccagaatattgtaaatgatattgctgaaataaaattcgtctcgtcaatggataaatcaatcgaaatgttttcattcttctgcttcacggtttctgcaatttcctgaatgaaaggctttaaaacaattcgctgcggtttcagagataatcctgaagcatcatttttggcaatattcagtattttttcaatatgactattcagtttgtggctctgatccgtgatgatggaagtatacgtttgtaatttagggttttccttgatctgctcctgcttcgttaaagcttctgaagccagcagtatagaagaaagaggtgttttgaattcatgcgtcatattattgatgaaatctctctgcagttccgagaattttttctgctgaataatcgtataaatagaataaacatataccagaagaatgatgataagagcaaaagtaagaagataccagaaacgtaaagagcttatcaggtaagtggttttatccggaaaacggatggaaaaataatacaccagatttttatgcttcggaaatttaatcactttttcattaggactttcctgatgtttcgatacgaattttccgtaaatcatctggtcgctgtggcaattgtacaatgcgtaaacataatcggtattgatctggaaacgtgtaaattcagttttcaggtaatgttccagaacttcaggatgaaattcattgttaatatttaccacgtaataatcattggaaatattttgaacaggactttctgtaaaggaggtttttccgccggaaagtttttcaaccacttccagtaaagcaatgtttacagtctgattgaatttcttgtcttcaagattataagcctgtcgtgtccataatagctgtgctatcagaattccgataatagcaacaaaaccaagcgttataataatattgagtttctttatttccattttacaggaacaataatatccaaaaatatctattgatttctgatcattaacaacttattaacaaatgtttgagaccggttaacagaattaatataaatattcatcttacatttgtgaaaacaaaaataaatcggttctttttaattattaaaatttatactcatgaaaaatttaaaaatttcagcattattagctgttttggcattttctccgttttttgcaaatacacttccgactgacaataatccggttgtaagaattcttgcagacgttacatggaaatcagaatctattgatgttggaaacattcctcaaggaaaaccaaaaaccatcagattcgaatttacaaatacttcaaagaagcctatcattatcgaaaatgtagcgccttcttgcggatgtacaactgcggattatacaaaaacgcctattcttccgggtaaaaaaggatttgtagaagctagctacaacgctgctgcagcaggtcctttcatgaaaacagtgaacgttaccacaagcgacagcaaaactccaaagactctttcttttaaaggtacagttgttgcttcttaatctgaataaatttaatcttgttcaatataaaaacagcccgacaatttctgtcgggctgtttttgatttaaattgaattattttaaaacttttattttagagattctataaaaatttctaacggtgcgaaacaataatttttctgctgatttcttcagaatctgtattaattttcaacatataatttccttcaggaattcccgaaacattaatttcaatacggttggatattggtttttctgacgaactgtaaatcactcttccgctcatatccattaactgatactttagatttcccgatgttctgttttcaaattcaacatacacaaactggcttgccggaatcggataaatcttaattcctttgtcggaaaccacattcgatgttcccaaagttgagcatactgcattcgctttttgagaatttttaatcacatccactttctgatttcccgtaacataataatccagttccgaagtaatcattagactcgtagtcgcgccaagccaatcctgaagaagagaagcgaaaatctgccggtaatcatatcttctttgattttggttgtagtaataacttgtctggttggtaaatacaggatgatctcccaaaattcctgcggcagcagcgtttccaaccacaaaaaacggagcaagatctccatgatcggttcccacacttccgttttcacgaacctgtcttccgaattcactgaaagtaaccgtcattattttatctgcaatgcccaactgctgaatatctgcctgaaaagcggcaacagaattggaaatatctgctaatagattcgcatgggttcccaaatgcgtacttccggtttgtacctgactcacatgggtatcgaatccgcttaaattcacttggaaaatcttggtcttgctgcctcctttaatcattcttgccactgttttcagttgttttcccaaagacgaattaggataagtagtcgtggaattgtttccggcgttgaaaacctgcatcacgcggtcatagtacgcatccatactcgtggcgactccttttatatagttgagaagatcattatactcagaattcattaaattcaaattgctgaaaacactcgactgaaatccggtcatgttgtattcgatatttttctctgtcgtgtgctcataaaacagacacggattgagatttcccatctgtatagcaagcggatcaggattcagcgtcgtcggatttccggcaagtccaggatacagcgcaccaagataccttccaaaaataccgtcaagaagatccgagtttgtagttccgtctttccctgcaaacattaaattttctgaccggaaatgcgaataattaggattcggatagcccactccgttcattaaaagcagttttccggaatcatacagatttttaaaacctgtcatagaaggattaagacctacaagtttacccgaagataccgtgctgtctaacggaatataacttcctgttcctgaactttcaatttttatattgggacgcaatgcggcataggtactgtactggctaatcgggatcaccgtattcaatccgtcatttgctcctgcaagtctcagaataaccagagaacggtcgttaaccgtatcacagttcagttgaaaatccaaaaactgattcataaacctcgaaggcattccgttaagataaaacggagctccaactcccgcaagagatattaattttaaaaaatcttttctgttcatgatcttaaattatttggaattcaggagatttaatgatggcttttaccagtctgtcaatagggatctttacattattggcatttcctgtattgaggtagttattccattcattctgccagttgatggtacttaaattattcagaaaaatacctttgaaataatcataacgggttccgtccggaacttccacaaacatcatctgaagaaattctgttaccagagtatctgcattggcgggattagaaaaatatccgctgtcttttacaaaagaggcattattcagtttaaaggtaaagccgttgtaggtaagtccgttaatgagataatcaatcgtattgttataccgtattctcagagatgatgttgtgatccagtttttatcgtaatttgggctgctgtaatatcctgcatatccgtttaccgactgtggattaaaaacaggcattcccatattcgaagaataattattcaccacgttcatcagactgtgtattgccgaaggatttgtattgtaaagcggaatctgaagattcagcagagaaaacatatggagataaagctcaaccggatttcttacaatgtttccaatcgtctgatctcccataatactgtcttcctcatcataaaaatgtttacttttaagaagcgtggtgagagcaggaataatattgtaattgtctgctttcagagatgctgccaaaggaacaataatatcattttcgatctcggtggtaattaatcttcccacaaaataacggtacattcttctgcaatacgcttttgccgtttcatcctgattaaaaatcatattgatgaaattctgaagctcagctttaatcgttgcgtctgtattccctcccgaaattgcctgatttccgaaagctgacgaaaaagttttggttcccgtatcgtgcgtgttaacttttacctgacctgtcggaatattcgttgctgtatccagagaattaagtcttgcagttttatccagatgtaccgatgaagtaagagagaatcctgttaaaactcttgctgcctgttgtacatctgtttccgtgtaattggtatagtttcccgtagcaatctgcggtccttttaaaatcgtaaacaattccagaaattcccttgcataattttgattgggacttgtgctcagattcacattattattcaggaaaacaagcattctcggattttgtgttattctgaaagccagttctttaagacttccattcgcatgaaacctgagaagctctttataatcataatttgtccagaaagaagcattatcatccgttacaaaaagaacatgaagaaaataagcaattttgtgctgtgcagaaggatccttcaaagcactgtaaagccaccagtaaagatcgtttctcacgctgtttgccgtactttgggtatcggtaatcgtaggatttgccgctgtcgggacaattgtttcacccacattattcagcggagaaggcgggacaggattgctgaacgtaaataattctgcaagtgcctgttgcggagttttggtggcaaaatccagaactttagcctttgtaatgttgtaagtggtgcgtctgagaagatgataagcattcgaaaatcccagaactgtggttttaggagtaagacttggcataattatgctttattttgaacaaatgtacaattttaatgaactaaatgtaattttttaaaccaattataaagattaaatttaatatatattgaaaaagtttcatttttcgttttgtttgggagacttcagtattctgtctgattattctatatcctgcatagctttttactctgccaaaacaaatatttatagtaaatttactacttaacgtaatctattaatactaaattatgaatctttatacacagccgatgcttcgcgaaggagctttaaaagataaagtagtcattgtaacaggaggaggaagcggtctcggtaaggcaatgaccaaatattttcttgaattaggcgcaaaagtagtcatcacgtcaagaaacctcgaaaaactacagggaactgcaaaagaactggaagaagaaacaggcggaaaagttctttgcgtagcatgtgacgtaagaaactgggatgaggtagaagccatgaaagaagctgcgttaaaagaattcggaaaaattgatatcctgctcaacaatgctgccggaaactttatttcacccacagaaaggctcactcactctgcttttgatgctgttctggatattgtgttgaaaggaacaaagaactgtaccctttccgttgggaaacactggatcgattccaaaacaccgggaacggtattaaatattgtaactacttatgcatggacaggttctgcgtatgtggttccgtccgcttgcgcaaaagcaggcgttttggcaatgacgagatctttggcggtagaatgggcaaaatacggaatccgtttcaatgccatcgctccgggaccatttcctacaaaaggagcatgggacagattgcttccgggaaacttacaggaaaaatttgacatgagaaagaaagttcctttaagaagagtaggagaacatcaggaactggcaaatcttgccgcttacttagtttcagattattctgcttatatgaatggtgaagtcgtaaccatcgatgggggagaatggttgcagggagcaggtgaatttaatatgttggaagatattccgcaggaaatgtgggatgcgctagaagctatgattaaagcaaaaaaatcaaattaaattttagattttaatgttttcactgtcattctgatcggaacgaagtggagtgaagaatctctaaaaaagaatatttagattcctccttcgtcagaatgacaatgtgtataaaaatttatttggatatactttatttatcatgcttggattttaaccacgaagagcactaaagatttcataaggaacacaatagttgtgagctttgtggataaccttagtgtacgttgtggtaaaaaaataataatgattacagtgagcaacatttaattataacatattgcggataatcagaaaaatttaaattgttttctaatttaaaaagaaaaaaatcctttaaataaagcaaaaagtagattctcaatggggaatctactttttttatttgggtgattttacggttgaaatttaggtgatttactgaaacatctcatcacgcacgactataaatttgcagtatcaatttttaataacctaaacaaccaaacatggaaacattaaagtcggtgttggaagcgaaccacaccaagaaaacaaaaagtgaattaattgatttattaacaggactggaaaaatctttaagtcccgcagtttacgaaaaagtttcaggaattgaaacatcagaactttcttctctttccaacaaagaattggtaagcattattgaagacttcaagaaaaattacgatgagaagtgggaaaaatctttcgcagccgtttcttcagaaatcatgaaaatgatggcaggaagaatggcggcagacgatcaggttttcaaaacttcaggagccgaaagcgcagattttgcagcagaattgggaagcatcgattttgcaaccatcatcggaggtccgcttgacgcttgtgtaaaagcacagtcgaatgcatctatcagcacagtaaatttcatcaaagaagtaggattcgagcaggatggaagcgacagcaaacttcgtatggcggaattcaagtacaaaaaaatgggaccaaaccctgattttgatccggcagaacccgaaagttccaccaatcctaaagaaacaatgaacgatgttgaaatttcagttcctttcattgcattactaaatgttccgagcttcagaattgaaacctgcgaagtggatttcaatgtaaaattaaattctacttacaccaaagatgtaagcgatgaattcgggatcactgcgggagcttcaggaggtttcggaccggtgaagtttaaagtggatgtttcttacaaaagaacttctgcaacaggaattaaagtggaaaaagaatattctctgggcgtaaaagtaagagcaaccaacgacgaaatgcctgcaggattggaaaaagttttaggattacttgcacaataaaaaccctttacgagaaatgattaaattatcagattacctggattatctcaacaacgagataattcaggctcgtaaaaaagcagacgaaaatgcggtaatgatcgcaaaagaatatgctaaacacgagtatttaaagttttttaaagttccaagatattcgcttccgagtgtaaagatggatattcccatcaagatcacggatattgatgcagattcgaagtacaatttcaagtacagcgaagatcagcttgtggaagatgttaacaaaaaaatccgccttgtcaataaagagaaaaacctcaatatgacggaaatcagcaaaaaacagcttcagaccaaagaatttaccagtctttttaaagcacttgaaaccggagaccagaaattcggaaaaaaaccttctgtggaattgcttaaagttgatctcagacagaatgttaaaagtttaaattccggaattttccgcgtgcaggaaggaaacggcgaagaggaagtgaatgagctgaaagaaatttttagcaatgctttgctgaacagattcagccttgtgaattctaaaatcaataacatctacatcgatcccaataccaactctgcggaagacaaagacaaacttttcgtcaatcttcatgtggaaatggaagacgaaggaatcagaatcgtctcttttaaagacaaagacggcaaagaagtcgaacagataatttttgagtaatgcaggaactcgttcatcatacgatacagaaaattcagggattgcttgagcattttaataaagttcaggagctttatctgtcgaagtcttttgattttgatgcgcagtttgaggaatttctctacgaatttttagattacctgaaaaccaaaggaaatactacgtacgaatccgaagttttaaaggttatgaacatgatttccactgtaaaaagagggtttaatcctgttcagatggaaaaaatagcttcgggaaaacgtgagatgacttggggattttcattcagtgcaatggaaagtgtacacaagtttttaatggaaatgtataccaaagagcataaaaaactggatgaagcagaagaaattttgtcaggattaatagtttctctctatcaaagcggaatactgaacgacgaaatcgtgaaaagtctcgccaatgtaccaaaaattgaagacttctggaattctttaatcaaacaaaacactcagatttcaggaattaataaaaaactgagattacagatgatctcggaagacatttacctgcttcttgaaaaaattcttttaagattaaactaatttgtaacaatttaaaatctttgtgttcttaatttaagtgaaatcgaaaattcgacgtagtcaaacacctttgtgagccttaaaaacaattagttgtaaaaaaactctatgggctttgcgttaaaaactaaaaacatttaaaagatttaaaattcactttaaaaacaaaaccatggaaaatgaaagatacattgttgttctcgaagatcagcataaaaattccctcaaaaaaattgaaaatgaatttgatgtaaacattacctcatcagaatttctttccgcagaaaaccgttcctacgatgttattgatgaggataacggagttctctacaaaaatctgggcgttcttgtggttgaaaatatggatgaagcacagttgaaaagcgctgtgaaaaacgattctaacccgatcgtttattttgaaaaagaaagagattttttttcggcggatgaactctccattatcagtgaactgaaaaaacagtccgcagagattgccgacaaaatcaccgagcttgaaaaatatattataaataaaccgttaccgcagaaacctttagtggaaatggaatgggggctcaaagctttgggtctcggaaattcattatacacaggaaaaggtattgatatctgtattctggatacaggtctcgaactttctcatcccgattttttcggaagaaatattgaaggaaaatccttcattgccggagaagactggaaccgcgatcccaacggtcacggaacccactgtgcaggagttgcaacaggaaatataagactggataacggaaaacggtacggaatcgcaaaagatgccaatttaaaaattgcaaaagtgctttccgatgcaggaaaaggaaccacaagcagcgttattgatgctatagactgggcaattacaaagaaattcagaattctgtccctttcactcgcttctcccgttctgctgaatgaagcaccttctccgctttttgaaaccataggagcaagagctttggaaaacaactgcatcattattgcagcagcaggaaacgacagcaacagaccggctgttcccaaacctgtttccatgcctgcaaactccatgtcggtaatggcagtcggagcgattgacggacagatgaaagtagctaaattttccaatgcgggcttaaatccttcaaccggaggaaacgtcaatatctgcgctcccggagttgatatcatcagttcttatcccaaaaattccaaaaataaaacaggcaattattacgcaatgagcggaacaagcatggcaacaccgcatgtttcagggcttattgctttgtacatggaacagtttcccgaaaaatccgcaaaagaaatctgggaacttgttgaaacgaaggcaaaacccattgaaggtttgaaatacagagatattggaaacggacttatacagatataatgatgaaaacatacttagcagttctcaaaaaaaatacagatatcagacagcttgaaaaagaactgaaaaaaaacaatgtaaaattgtctgctcactacaaaaccataggagtcgtaaaactcgaaagcgaaaagactatttccgataaagattttgagcagtattttctttctgtggaagaagataaagaaatttaacaagataaatgaagacatcagacttttctgtccggagaagtcttatttttgtttactttgttaaattaaaaatagtaatatgaacttcaaaattccaacccttgtttctgcgcttgccgtgatgttcttttcacagtctgcattggctcaggaagccccgaaatacagctatgtagaagctttcaaaccatttttctatacacagacaggtacgcctacaagatccgcaagcggacagccgggacacgcgtactggcaaaattcggcaagttacaatctcgatgtaagccttaatgaagccaaaaacgaacttacaggaaccgcggaaatcacttatacaaacaacagtccggataaattagggtttttatggctgcagctcgaccagaatttatttgcaaaagattcaagaggaaatgcagtcgtaccgacttcgggaagccgaaacggagcgcacggtgaggaatttgacggcggttacaaaataaaatcggtaaaactggacggaaaggatgtgaaatataccattaccgataccagaatgcagatcgatcttccagcagaactgaaagcgatgggaggcgtcgcaaaaattaagattgaatattctttcctttctccaaaatacggttccgacagaatgggaattcaggatacgaaaaacggaaaaatctttacgatagcacaatggtatccgagaatgtgtgtgtatgatgatgtcatgggatggaatacgctgccttatctcggtgcttcggaattttatctggaatacggagatattacggcaaacattaccgttcctgccaatcattatgtggtggcttcaggagaattactgaattcaaaagaagtgtattccaaagaagaaatcagccgatgggatcaggcaaaaaacagcgataaaacagtgatgatccgttctgaatctgaattaggaaaaaacaattcaacaggaacaaaaacatggaaatttaaaatcaatcaggcaagagattttgcatgggcttcgtctccggcatttattctggatgcggccaaaattaaccttccgagcggaaaaaaatctttagcaatttctgcttatcccgtagaaagtgtagggaaggatgcatggagcagatctacagaatacacaaaagcagcgattgagcattactctgcaaaatggtacgaatatacctatccggctgcaaccaacgtagcaggaaatgaaggcggaatggaatatccgggaatagttttttgtcacatggattccaaaggcggcgatctttggggcgttacagatcatgaattcgggcacaactggttcccgatgattgtgggttccaacgaaagattgtttgcatggatggatgaaggatttaatacattcatcaacgaactttctacggaagctttcaacaaaggtgagtattacgaaaagaaaaatattgcgcagatgagcggatatattatgaatgacggttttgaacccatcatggtaggtccggataatatgaaagagaacagcatcggagctttggcatatttcaaaccgggaatgggactgcaaatcttaagagaatctattttaggacctgaaaaattcgacaaggcattcagaacctatgttgaaagatgggctttcaaacatcctaccccttgggattttttccacacgatggaaaatgtgtcgggtgaagagctgaactggttctggagaggctggttcatcaacaaatggaaaatcgatcagggcattaaaaatgtaaaatacgttaacggagactttaaaaacggagcgcagattacggttgaaaatatcggacagttaccaatgccgaccaacgttcaggttaaatttaaagacggaacgcagcagataataaaactgccgatcgaggtctggaaaagaaatacggaatggacattcagaatcaattccacaaaagaaatcgatcaggtgaaactggatccgaattcagaaattccggatgtggattctaaaaataacacatggagttccgctgatgcaaaaccgacggaaaaagtaaatcttaaagaatttacaggaactttcggaagcaaggatcttccgatgaaaattgtatttacagagaaaaacaaccagctttttgctcaggcaacaggacagcaggaatttcctctggaatataccgggaataatacgtttagtctggaaatggcgcagatttctttaactttcagtcaggataaaaaatcatttacctttaagcagagcggaagagaatttaaatttaataaagaataattttaatcttttaaaccattaagttctaaattaagaagttaagctttattaaggaaaatcatttttttaaatcttaaaaattagaaacttagatattcttaactccttaactccatcttaatggttcaatttaaataatatatgattgtccgtaatttgccataattggaaaatctttgagttctttgctgagtgaatagtgtatgctgagcttgtcgaagcacctttgcgaacttaaaaacagttagtatataaagaatctttgcgagtctttgcgttaaaaaaacagtttgattaatagcggataatcaataaataataaatcaaaacttcggaaaatactccggagtttttttgtttttaaattgaatttaatattaaagtgcctaattctagatgcgattttaaggagaaatcttacttttgttactttgttaattaaaatagatgattatgaattacagattttcaatcgtattcctgatgatttttgcattgggattttcgcagaatcttaaggtgatgagttttaatatcagactgaatgtagattcggataaagaaaattcgtggacgaacaggaaacaggatgttgcagatctccttacgtattatcatccggattatttcggcgttcaggaagcgttgccggatcagatgaaggatataaaaaacggattgaaaaactatgattatgtaggagtgggaagagacgacggaaaagaaaaaggtgaattttcggctattttttatgatacagacagattgcaggttttaaaatcggatacgttctggctttcggaaactcctgaaaaaccatcaaaagggtgggatgccgcgttgaacagaatctgtacgtatgctgttttcagagataaaaaatctaaaaaagaattcatggcactgaatcttcatttcgaccacatcggaaatatagcaagagtgaaatcttcggaattaattttaaagaaaatcaaagaaatcaatcctaaaaatctgcctgtaactgtgagtggggattttaatttaacggaagattcagaaccgataaaaattatgtcgcagaatatgaaggacagtttttatcattcagaaacaaaacattacggtccgaaagggacttttacaggtttcaatgtaaatgaaattccgcaggacagaattgattatattttcgtgaaaggatttaagatcaaatctcacagacacatcaacgacagaagagaaaatctgctgtatccatcggatcactttccggttttggtggatttaatgttttaaaatggctttagtcaaatatttaagataataaatgatttctgcttaattgtaagcgatcaaaaaataatacaaacggtaataattatattgccgttttttgttacttttatgttaaataaaatacttattataaaaagattttaatgaaaaagcttgttttgggtgtattgtttttagtttcatggcaattttccgcgcaggaattgtatatgccgagaaatattaaaaaagcatacgaaaacggaacccgtgatctgtcgggcgctccgggtaaaaattactggcagaataaagggatttataatgttgaggtaaaggtagatgccaattctaaggtggtttcgggaaaggaaaccatcgtctataccaacaacagcccaaatgatctgaatgatcttgccataagatttgttaataatctccataaaccacaggctccgagatcgggcgttgtttccaaagattttctttcttcggggttgcatattaaatcatttgctgtaaatggtgaaaaatataacgtaaacagcgacgattggggaacggttgaaaaaataaagctgaattcagccttaaaatcaaaatcaaaagctgaaatccgcatcgagtgggagtatcctttatctgtacaaagcggaagagaaggacagatagatcctgaaacattttatgtagcctattctttcccgagagtctctgtttatgatgattacaatggatgggatatgcttccgcactctgacagacaggagttttataatgattttaacgattacagttttgccattactgcgcctaaaaattacgtagtctgggcaaccggagatttcctgaatcccgatgccgttcttcagtctgagtatttaaaaagatataagtcttcgttaaaaagcgacaaagtcattcatattgcgactgagcaagaaatgaagtccggaaaagtgacaaagcagaataaatggaatacgtggaaatttaaagccagccatatcaccgatttctgctttgctttaagcaatcattatgtttgggatgcagcaagtgttcagcttaaaacgaaaagagcaagtgttcaggcaggttacaaagcagatgcaaaagattttgagcattatgtggaatggatgcagtataatctcgactggttttctaaaaactggcccggagtggaatatccttacaatgcgatgacggcaattcagggatacgcagatatggaatatccgatgatgattaacgataccagtattccggatgattttcaggatgcgagattaacggcagatcacgaaattgcacatacctatttccctttctatatgggcatcaacgaaacccgttatgcttttatggatgaaggatgggcaacgactttggaatacttaatcggaattgatgaaaacggtgaagcaaaagccaaagaattttataaaaatttcagggtaaaaagatggatcaatgatccttctgcggaacaggatcagccaattattacgatgagtactcaggtaagcggagcaggctacggaaacaattcttatgtaaaggcatccctgtcttatctggctttaaaagattatctgggagatgatctgtttaaaaaagcattacatcattatatgaacaactggaacggaaaacatccgattccgtgggattattttaattctatgaatacaggttcgggaaaaaatctgaactggtttttcaataactggttttacaccaataattatatcgacctgaaagtgtcttcagcatctcagatgaatgatcttctgaccgtaaatgtggataatgtaggtggttttgcgattccttttgatgcggaaattggctatgaagacggaagtgtggagaagcttcatttttcaccatcggtctgggaaaaagatcagaaaaaaacaatgcttacggttccgattaccaaaaaagtaaaatcggtaaatcttgacggaggtatttttatggattatacaccgaaagacaatactaaaacattataaacaaattccggctgtttctctgaaacagccggaatcatttgtattaaaattaacaataaagattagtatagtcttaaccctgatcttgctccggaagaagctacaacagactgcattctggttttttgtcctgcggagaacataaacatggcagcatcatccacataatccatgtaattcatgaacattacagatctctgtacgccgctgcaggtattgtaaagagggtagcttggttttcctgtgttagctgttgtttgcgtaggtgtatcgcttacaaggtcgtttccacagttcgcatctccccaaatgtgtcttaagttcaggtagtgtcctacttcgtgggtggctgttcttcccagattgaaaggagaagaagcaccggtcttaccaaaataaggagacgcaattaccacaccgtcgttccataatcctgaagattccggaaaagttgcatagccaagaatctgtcccatatttcctaccgtccagatgtttagataattagaagggcttgttgcatcaattcctccggtagatgctttcttcatcgcatcattggtactccagcttgttttggtagtagattttctcaccacatttgccagtctgaatcttactttcacatcccccgcttttaccccctgaaattcggaaggaatttttgaaacgtcggtattcgttcctgcataatctgcattaagaactgcaatttgttctgcgatacgagcgtcagaaacattttcagcagttgttctgtataagacatttaccactaccggaatttcaacagtaccatcggataatactttccccagcttcatgtcattttcaaatctttcggttttagcttcaatttcagaatatttctgtctcagctccgaactgtttttcaatgccacttttcggatttcttcagaagcacagcctctttgcagtgcggttccggaaattgcaggcgtgttttcagattcttcggtctggttagaaacgttgtcgctgttacaagcagaaaggaaactcagcataagagctccgaacattagttttttcataaaaatacaatattttgtttcggagatgaaattatactatttgaagtaattatgcaagtatttcaccgtatagttgaattattttattattcaataaatagtaattttcaatatatgttgctgtatttttatttaaacggtatttttgttgattatttaaaactattattgagtaatgcttgagtgttgattttaacctgcaaaaccgtttttaatggcaaaaacggcaagaccaacccgcgttttaagatctaatttatcacaaagctgatctctgtagctttctaccgttctcgggctgcagcacattttatccgcaatttctttatagctgagttctgtaacggtgtattttaaaaactctttctcgcggtcggaaatttttacattattggcagcatcttcattgttcatgttggaaaaaataattttcgaagcccattccggataaaaaaaaccgtcattgttaagtttcgtcaatgcattctccagttctttcgggtgtgtatttttcagtaagtaccctttggcgccgttccggatcattttaataacgcttttatcgtcgccctgcatgcttaaagccattactttaatgttcggatgatgttccttgagccaaagcacggtttcgaaaccgtccataatcggcatactgatgtccagaagaatgatatccggaattttgctgttattttcgaatttctggatcagatcttttccgttttcggcaacgtagattacttcaaactccggaaaattatcaataattccctctaaagcttttgcaataagtacatgatcgtctacaattactatcgtttttttcatggctgtctttttaaaataatgttgagcgtagttcccaaatttttctgactttcaagacagaaatctgccccgataatttcggctctgtttttcatattggtgagcccgattccgttggatttgatgttggactgatcgaaacccaccccgtcatctttaatattcagctcccaaagcagttcctgagaggtgttcagattgatgaaaatatttttacagcccgaatgtttgatgctgttctgaataaattcctgagtaattctcaataatacgtttttatgcacaaagctgagatccagttgattaaaattatgctgaaaatcgacatgacattttttaaacgcattggtattgtctacttcttcctgaattaaagttacgatttccttttgattaatattgtcgtccgttaatgtttttgaaaggctcctgagatcatgaagcgactgattgatgatctgtgaaacctgctcaattctttcgcttacctccggaactttattctcatacaaaagctgctgtgtgtaaaggctcactaacgttaatttctgcccgatattatcatgaagttcgcgcccgatctgttgcatcgttgcctgctgaatttcgagctgcgtcgctaacaattctttctggtgaatttcgttttttatttcaatctcattcagatattctttcttgcgctgtttgtatttgcggatataaaccatcactgcagccacaaacaatacaaaaaagatattgaatagaattaacgttactaagagttctgtcttccccatatgaatgaaattgagaataaaagatacatgacgattcctgaaagtaaaaagtaggaaaaataaatattatagatctctttataatttctgataaatggaaaaaaagtccagaatggaagtgttcctatatagaataatgtaacccccaaattgatgtaaaacattgggtttttgttaaaattcagaatattggacgaattaatttgtttataatattccataatcacaaggatcattaaaattaaacaacctaaagtgtaattaattgaaaacattacattatctgtatctaaaataaattcacttggaataaatgataaaagataaatagcagataatgctaaaaatgttttctgtttttcaaaagattttgcagcatacagccaaaagaaaaatataaactgtacaggaataacaaaataattataaaaggcttgtttattatagtctataaaattttctccccactttccaatacattcacaaaggaatataaatattaaataaaatacaaagtatttccaatactgatttttaatttgcttataataacaaacagagattaaggcagctatgccttcactccagaataaagattcatatataaatttttggaaatcggtcattgtatttaattaatatttctttttttagattaaaatgattctgtaaccgtgttgttgggaggaataagatgaccatgattctgacagactacctctccctgcaaaccgaaatttcttgccgaagccatcgccagaaattctccgcttccgcttgtgcttaaaggattgaaatcatagcaaagcctatctccgttttcatcttcctgtttcatggtaggaaccaaaactaaagtgtgtctctgcgcatattctgttccgatcggagttcccgacatgatgttccagtcctgctctttaggataagccgcataataaaaacgtattcccaaatcctgatctgtaacgcgggaatcattttttatcgcctcattttcaatatccgaaataaattttttcagcgttgccaaatcaaaatgaatggaatgcgcatcgtcgaaccctaaattttggtttacacacgccaactgattttttctgtagttctccacaagagttcttattaaatcacaatgaagcgtgttgggattagaaattgattcggctgattcaaattctaagttgtctaaatttggtcttgtttccataaagctagttttaaaaggtgaaaggttagttggtattgcaaatctcgtaaaatttcaggggaatacgacacggttttttcctgattatttatggggtttttacggattgcaatttttaattaaaatgataaagattttggatagatttgcagcgattattaaattcattaatcgtaaacaataaattatcaaatgaaaagacagactatcgcattactttgcatagcaatatttagtgtttcatgcgctaagaaagatgaaaatgcagcggatggcaaatacacggatgatcagaaagcttcttattacataggtctgagcattgcccaaaacatgaaacaggaaggcttcaaagtagatgccgatcttttggctcaggctattaaagaagaaatggatggaggaaaaaagctgatgccggctgaagaaatggaagcttttatgcaggagtttatgcagaagcaacatgaaaaaaagcaagctgcagcgggggtacaggcagatgaaaataagaaaaaaggtctggattttcttgccaaaaataaaagcaatcctaaagtgaagaccacagcttccggtttacagtatgaagtcctgcaggaaggtgacggtaaaacaaaaccaaaaacgtctgatattgtacaggtaaaatataccggaaagcttctggatggaactgttttcgactctaccgacaaaaacggaggcgcaccaatggatattaatctgggcggtgtaatcaaaggatggacagaaggtattcagttgatgagcaaaggatctaaatacagattttatattccttcagaactggcttacggagataatggagccggaccaattcctgcaggcgctactattacttttgatgtagaattagtgaatataaaatagaaatatttttgattataagatttataaagtattttacggctgatgtattacaaataaaatttccgcagattttttggtctgcggaaattcttcaaaaataatatatatgaaaaaaactacttataaatcggtcggtctgaaaaccaaacctgtctcttcgaaataatccagtgttattctgtcgccatcgttcacttttccggcaaggatttctttcgataaccggttaagaacttcctgctgaatcactcttttcagaggtcttgctccgaacgcaggatcataccctttattcatcagataatctacagcatcctgagttgccgtcataatgatatttcgtttcgaaagcatttcattaaatcctctcagttggtaggtaacgatttttccgatttccttttttcttaaaggctggaataatacaacctcatcaattctgtttaagaattccggacgtaacgtctgtttcaataaatcaaagacctcatcttttgttttgtcaacaatctcatcctgattttcatcagtaatatgttcaaaattttcctgaataaggtgcgaacctaaattcgaagtcataatgataatcgaatttttaaaattcaccacccttcctttgttatctgttaaccttccgtcgtctaaaacctgtaacaaagtattgaaaacatcaggatgcgctttttcaatttcatccaaaagaaccacagaatacggtcttcttctcacggcttccgttaattgtccgccttcatcatagcctacatatcccggaggagcacccactaatctcgaaacactgtgacgctcctgatattcactcatatcaattctcgtcatattgttttcatcatcaaataaaaactccgctaaagcttttgccagctcagtttttccgactccggtggttcccaagaataagaatgacccgattggttttttatcatcgctcaatcccgctctgtttcttcggatcgcatctgcaacagcggtaattgcctcgtcctgtccaactactctgtgatgaagttcggtttcaagattcaataacttttctctttcagactgaagcagtttcgtaacaggaattccggtccatttggcaatcacttcagagatgttttcagaagttacttcttctttaattaactcattctgatgattttgcatttcgatttcaagctttttcagctcttcttccttttcgcgcagctttccgtattggatttccgctacttttgcgtaatctcctgctcttgaagctctttctgcctctaatttcagagattctatatcttttttaatctgcgttaaatcttcagatttttgcttttctttcagccatttggcgttaatttcatttctctgttcagaaatcttcgcaatatcttcttttaaatgatcgattttcgtctggttaccttctcttgaaatcgcagccagttcaatttccatctgcattaattttctgtctaaaacgtccagctcttccggtttcgaattgatttccattcttaatttagccgatgcttcatcaatcaggtcaatcgctttatccggtaaaaatcggtctgaaatatatcgttgagacatttccaccgctgcaataatcgcctcatctttgattcttactttgtggtgcgcttcatacttatctttaattccacgaagaatagaaattgcggattctgtatccggttcttccaccattaccttctggaaacgtctttctaacgctttatctttttcaaaatacttctgatattcatttaaagtcgttgctccaatcgctcttaattcgcctcttgccaaagctggtttaaggatattcgcggcgtccattgcaccttcaccgcctcctgcgcctaccaaagtgtggatttcgtcgatgaaaagaataatctgtccttccgatttaataacttcattcaccacggatttcaaacgttcttcaaactcgcctttatattttgcaccggcaatcaaagcgcccatatccagtgaatataaggttttgtccatcaggttttcaggaacgtcaccgctgataattctgtgggcaattccttccgcaatggcggttttaccaactccgggttcaccaatcaggatcgggttgtttttcgttcttctggaaagaatctgcaacactcttcggatttcttcatcacggccgattacaggatctaattttccttctgctgctaactcattgaagtttttagcatatttatttaaagattggtatgtttcttccgaacttgcagaagtggctttcgagccttttcttaattctttaattccgccttccagaagactcttggtaacgcccatatctttcagcattttcgaaacttcagaattggtttccaataaggaaagccataagtgttcaatcgttacatattcgtcgcccatttttttagcaatgttaagcgcatcaagcaaaactttatttgctgattgtgaaaggtaaatattccctccctgtactttagggagcttctctaaattttcgcggttgcgctctcttaccaaagccgcatctgcttcagatttttttaataagaaaggcgatatattttcatctacctgaaaaattccttccagtaaatgttgaggttctatctgttggttgccaaattccattgccacctgttgtgcagcctgaattgcttcctgagattttacggtatattgatttaagttcatattttgtatatttttgattctttaatttttagtttccaattttagattttagacatcagatttcagaccataagagtcaaataaatgttaattttttaatcagattttctaatttctgatgcccttaatctttatttaatcatttaattcggatacattatcgcaaaaagtattctattgttgaatttttaaaaatatgggacaaattttccgaaatatttatttttaatctgttttgaaaagacaaaatttccgattcgaagaatttaagtgaaaattatcggaagaaccgtcagattgggttgaatctcaaaatacgtctaaccttattttttgattgaaccattaagattttaattaagaagtttagaatatttaagagttgcttcgctttccaaaataatacatattaaaaatctattgattttttcttaattaaacttaacatcttaaatcttcttaatggtttaagtaatttttcatttcatcattttgaaaaagtattatgcagtgtttggcttttaatttttagtttaaaaatcatattctcaaaatcaaatattaaaatcaaaataattacttttgcgtttttacaaatggagcttaaagaaaaacagaaaaaaattttagatgttgccgtggaacttttcaaggagaaaggctacatgggaagctctgttcgggatttggcaaccagactgaatattaaagcagcttctttatatgctcacattcgttcaaaggaagaaattctggaatggatctgttttggcatcgcgcaggaatttttcgatgagcttcagcaagtaaaaaataccaatattccaccaaaggaaaagctcaatcttttcattgaaaaacatttgtcggttgttcttaaaaaccgtgatgtcacgcacatttattccaatgaatggaagcatcttgaagagagattacctgaatttatcgaattaagaaaaaattatcagcaggaagttgaacagttgatttctgaaatttataccgctgaaaactgggaattaagatcacccgcttttaccacgagatttattctccatactttaaacaattcctatttctggttcaaaagaaatattgattctggttctgatatcaccgatgaaattagggataaaattcttttcggtttactgggaaatcaaaagaaataaaccgtttagctgtcatttcgacgaaggagaaatctattaaacattaagtaaaaacagatttcttcacttcacttccgaactgtgttcatagactttttatctatgttttaaatgacaaaatcctcattaaaatcatccttaaactaaacctcaatcttagcctttaactatttagaatcattaaaaatctgacgaaaatcataaaaattttgtcacgttccaaaatctttttaaatttacacctaacaaatgttagttagttatggattttggtgttgaatatcttaagctcgatcagttgagacagcttcagtctgagcggttggcgaaattggtagactatcttggagagaagtcggaattttataaaagaaaatttaaagaatcaggaatatctccacaggaaataaggtcgatcaaagatattaccaaacttccgataacgtacaaacaggatttgagagacaattatccgtttggtttatttaccgtttcgaaaaatgaattgcagagaattcactgttcaagcggaacaacgggaaaaccaacggtagtgggatatacaaaagaagatgttgatttattcagcgaagtcgtggcgagatctttgaacgcagcaggagcgaagccgggaatgcagttgcataatgcatatggttacggaattttcacgggcggactgggattgcattacggagcggaaaaactgggaatgagtgttcttccgatttcgggaggaatgacggcgagacaggttgatctgattatggattttcaacccgaagtaatctgctgttcgccatcttacgctttaaccattgctgatgaatttgctaaaagaggaatccccgcagaagaaatcagtttaaaatatgccgttttaggttcagagccttggacggaattaatcagacagcatattgaagaaagattaggcgttcatgcaaccaatatttacggattaagcgaaattatcggacccggagtttcgatggaagattttgaggaaaaaggaggttcttacatttgggaagaccatttttatcccgaaattctcgatccggttacaaaagagcccgttccgtttggtgaagaaggcgttttggtgattacgactttaacgaagaaagcaatgccgcttctgcgttactggacaaatgatatcacaagtctttactatgacgaaaatggtaaaagaacgatggtaaaaatgcgtccgattttgggaagagccgatgatatgctgattgtaagaggggtaaatgtttatccaagtcagattgaagaagcattttctcatgtggaaggagtcgttccgaactattatttaactcctgttgagaaggaacaaatgtgtattgcactggatattgatgttgaaattggtgacgaattgatcgcctcgaaaaatttaaatcaaaataccgacgattatgctatttttgtcggaaactttggaaaaagtatagaaaacgaaataaaaaagagggtaggaattaccacaaaagtgaaaattcatgctcaggacagtcttccgaaatgcgaaggtggaaaaattaacagaatacttaaaaaataaatgaattcattttataaacttaaaacggtaaaagttcagaaagataccaacgatgcagtaaatgtagcggttgaaatccctgaagaactgaaagataaattcagattcaaacaggggcagtatcttaatttccgaatgatgatcaacggaaatgaagaaagacgttcttactccatttgcaatgcgccgagtgaaaaaagcaacacgctggaagttttagtgaaattattggaaggcggaaaagtttccggttatttcaatgaacatcttcacatggatgaaattcttgaggtaatgcctccgatgggcggtttcaacacgtcttatcatcccacaaacgtaaaaacatacatcggtttggcggcaggaagcggaatttctccggttttatcgaatattaaagaaagtctttatcaggagccgaattccaacgcgtacctgttctacagcaacagaagtatgaatcacgtgatgaaaaaggctgagatcgataaattgacagagcagttcaacggaagattgaaagtagtttatctcgtaagccgtgaaaagcatgaagacccgatttttgaaggaagaatttcccctgaaaaactggaacatttatttgaaagatatgcagatattgatgtaaaagaagccacgtatttcatttgcggaccttcggaaatgatcaaaggaattgcagattatttaaagaaagataaaaaagtaccggcgattcaggttttatttgaatatttcaccgctcctgacgaagaaaatacagaggaaatgagcgacgaattcaaagccattgccaacatcgaaagtatggtaacagtaatcattgatgatgatgaatattctttccatttgaattcaaaaaaagaaagtatcttagataaagcattgaaagacaatcttcctgtaccttttgcgtgtaaaggaggagtgtgctgtacgtgtaaagccgaagttttggaaggtgaagttttcatggaaaaaaactacgcgcttaccgaagaagaagtagcccgaggttacgttcttacctgccagtgtcacccgacaactaatgtggtgatgcttaattatgatgtttaagacaatttgaaaatgagtcaatgtgctaatttgaaaatgccatgattgtgttttaatttcaaattgcctaattctcaaattttcagattaattaattttcaaatttaaaaagatggatttagaaaaatttgtacagtacgtacacgacgaaaataaagtagaaccaaaagatgtaatgccggatgattacagaaaactcttggttcgtcagatttcacagcacgcacattctgaaattgtcggaatgctgccggaagccaactggatttccagagcaccttctttgagaagaaaaatggcacttctggcgaaagttcaggatgaggcaggtcacggtttatacctttattctgcgacagaaactttaggtgatggaaccatcagagccgacagagatgcaacgtatgaagatatgctttcaggaaaagcaaaatattcaagtatcttcaactatccgactttaagctgggcagatattggtgccatcggttggttggttgatggtgctgcaatcatgaatcaggtgatgttgatggggaattcttacggtccttactcaagagcgatggtgaaaatctgtaaagaagaatcttttcaccaaagacagggttatgaaattttgatggctctttgccgcggtacaaaacagcagaaagaaatggcgcaggcttcgttaaaccgtttctggtggccggctttaatgatgtttggtccaaacgatgacagttcgccaaactccaaaatctctatgaattacagagtgaaaagagaaagcaacgacagtcttcgtcagagattcattgatgttaccgttgctcaggctgaatttttaggcttaaccattccggataaagacctgaaatggaacgaagaaagacagcattacgatttcggagagcttccatgggatgaatttatggaaatcttaaaaggaaatggtcctgccaacaaaaagcgtatcgaaaccaaaagaaaagctcaaagagagaattcctgggtaaaagaagcggcagcagcttttgctgagaagcagaacgaaaaggtaaactaatttcttaatttaaaccattaagattttatttagaggtttagtttaattaagataaatcattctggttttaaatctaaaagcggagctaaacttaatattcttaacaacttaattgtccttaatggttcaaaaattaaaatttaaaataattcaaaatctaaaatttagataaaaattaaaatttgactatggcaaatttagatatgtgggaagtgtttattcagactaaaccggggttatctcacaaacacgttggaattgtacaggcgccaacagcagaaatggctttgcagaatgcaagagacgtttatacaaggagaaaagaaggaacttctgtttgggtggttccaagtaaatatatcgtgacttcggaaggagtggataaagaagcattcttcgatccggcagatgacaaattataccgtcatccaaccttctacgagatcccgaacgatgtaaaaaatatgtagattgattcaatttgaaaaatgtgctaatttgaaaattagaaaatgaccttatcacattaattattctcaatttttcaattaagacaataaatcaattttcaaattaactaattctcaaattttcaaattaaaaaacaatgaacccattatataattatttattaaaattggcagacgacagtttcattatgggacaacgtttgtctgcgtggtgcggtgaaggtccttatctggaggaagatattgcattaacgaatattgcgctggatgaacttggtcaggcgaacaacttttacgtttacgcttcaagacttttagacgacggaaaatctgaagatgatattgcttttttaagatacgaacacgaatatgtgaatgcacactggacagaacttccaaacgaagattatgcccagactattttaaaagtgtatgtttttgcagtctatcagaaactgatgtacgaagcattgtccaattcagccaatgaagaattggcggcgattgctcaaaaatcattaaaagaggtaaaataccattacacacacgctgcttcctggatgaaaatttttgctcagggaacagaagaaagtaagagccgtctggaaaaagccattgaaaacatctgggaatacaccaaaggtctatttgcaaaaacagaaggcgaagatgatttggtcgctttaaatattgctccgaatacagatgctctttatgaagaatttttagcgatcactcaaaaagattttgcagatttccagttagaatatcctacaaatcctttcatgcagccaaaatccagaacaggatatcacacagaatattttggatatatcctttgtgaattgcagtatatgcagagagcatatccgggttgtacgtggtaaaaaaatcaatgagttaatttgaaaatgtgctaatttgaaaattgaggagtgccataaattttcaaattacccaaattttcaaattttcaaattaattatgaaaaatcctttagaaatattagaaatggttcccgatccggaaattccggtaattaatatcgtggaattgggtattgtaagagaggcgaaaattactggcgagaattcctgcgaagtaatgattacgcctacttattctgcctgtcccgccatgtttaccattgaggaagacatcatcaaaattatgaaggaaaacggatgggaagcgaaagtggtgaccaaaatgtttccgatctggacgacagactggttaacggatgaagcgagagaaaaacttcgggtgtacggaattacccctcccgaaaaaggagccgacgagcatcatatcgggaaaccgaaaaaatgtccgcgttgtggttccatgaactcaaaacagatcagcagattcggatctaccttatgtaaggcttcgtatcagtgtttagactgtttagaaccttttgactattttaaatgtcactaaacaatttgaaaatgtgctaatttgaaaatgagtaaattagtggtgaactaaaattttcaaattgtctaattttcaaattaaaaaattataaactatgtatacacaactcgatattgagtcgcatttcgacggaaaacttaaaattgcttatctcaatcagccggataccatgaacgcgcttacaaagccgtctttatcagatctgaaagattttgtaaaagaatgcagtgaagatcctgcggtaagatgcgtggcgatttccggaagaggaagagctttttgttccggtcagaatctggatgatgcttttgttcagggcaatgaacatcatgacaacgatatcatcagaaaaattgtaacagattattacaatcctttggtaatggaaattacccactgcaaaaaaccggttgtagcgttggtaaacggtcctgcagtgggagccggagcaatgttggcgttgatctgcgattttgttctggcaaatgaaaaagcttattttgctcaggctttctccaatatcggattgattccagatacgggtggaacctattttttaccaaaattactgggaagacaattggctaattatttagcatttaccggaaaaaaattatccgcggaagaatctaaatcatacgggttggttgctgaagtttttactgaagaagaattcaattcaaaatcaatggaaattttagaaagagtttccagtatgcctacagttggtttaaaattaaccaaaaaggcatttgcacattcttatgacaatacgctgaagcagcagttggaattagaaggcgatcttcaacagaaagccgcagaaacagaagactttaaagaaggggtaagtgcctttttacagaaaagaaaacctgaatataaagggaaataattaatttgaaaatgagttaatctgagaatttgaaaatgagaaatgataaagagaatattattgtaaataagacttttgattttgctttagacatcattgaattttcagaaggtttgtatgaatctaaaagatttccattagcaaatcagattttcaaatctggaacttcgattggggctaatgttagagaaattcaaaatgcagaaagcaaagcagattttatccataaattgaaaattgccgctaaagaagctgatgaaacagaatattggcttttactgtgtttaaagtctccacatttgcaatcgcccaatgaaaaattaatttcagatttaaaagaaattatattaattctatctaaaattatttcaagttcaaaacttaaataattttcaaattaactcatttccaaattttcaaattaaaaatatgaatgtaggaattattggtgccggaactatgggaatcggcattgcacaggtagccgcaacgaacggatgcaaagtctggatttatgacgctaatgcaaaacaggtagaaacggcaaccgtaggtttggaaaaaacattgactaaactggttgataaacagaaaatttcatcagagaaaatgactgaaattttagccaatatttccattgctacagaattaaaagacttcaaagattgtgaattgatcattgaagccatcatcgaaaacaaagaaattaagaccaaagttttcacagaattagagaaacacgtttcagaaagctgtgtgattggttccaatacatcttccatttccatcacctctcttggtgcggaattacagaaaccggagcgtttcatcggaattcacttcttcaatccggctccgttgatgcctttagttgaggttattccatccttgttaaccgaaaaatctttagcggaaaaaatatacaatctcatgaaagattggggtaaaactcctgttgttgcaaaagatattcccggatttatcgtcaacagaattgcccgtccttactatggagaaggattgagaattgttgaggaaaacatcgcaacggtagaacaggttgatgatgctatgaaaactttgggtaactttaaaatgggaccttttgaattaatggatttaatcggagttgacgtaaatttctcggtaactaaaactgtgtacaacgaatatttctacgatccaaagtacaaaccgtctctccttcagcaaagaatgtcggaggcaaaacttcacggcagaaaaacaggaaaagggttttacgattattcagaaggagctgttaaaccggaacctgtgaaagacgatgcactttatcagcaaatattcatgagaattatttccatgctgattaacgaagccgtagaagcaaaaagattaggcgtggcgaatgacgaagatatcgaacttgcaatgcagaaaggcgtaaattatcctaaaggattattggtttggggaaaagaaataggatatgctaaaatctccgaaactttgcaggatctttacgaagaatatcaggaagaaagatacagacaaagcctgttgctgagaaaattataagatgacgttttttcctgaaaaatctgaagaattaaaatcttcaaaagtaattgaagaagtattattaaatatcaaagataatactgagatcagttctttgacaatgagaaggtctgataaatatttcaagggaaatatagataagaattatttcaaaatcatcagttcagaaaagcccttaggaattttctgtgtttttgaaggaagattggttcggaaagaaagtgaaacaataataaggttggatgcaaaatttcataatacatttaaaatattgatttatatatggagtttgcttcccttttttatgattattataaattttttagaacttggagtagaggctttttccctatttataccacttttgatgacatttggatttttatattttataattaattttctttttaaaaaatcttatgaaaatgggattaaacatttgaaaagaataatcaatcaataaaattgatttttatgagtaggtcaaaaagaaaaactccgattatcggaatcacaactgctgaaacagaaaaggaaaataaactagaagccaatagaaagcttagaagattgaatagaatgaaaattcataagggagattttgaattttttcagctaagagaaatatcatatgtctggtgttttgataaagatggtaaacaatatttaaaaaatcctggcagaaaggatttgatgaaataagtaatatttaggatggatatagaatcattcagagctgaacttgagacaaggcttatcattgaaaaagaatacatcattcaggaactttcctcgatacatgattatcaggaaaagcttgaattattaggtaaattcaatgaaaaatataaagaactgattaaaagattggcaaatgaatttggaattgatttaaatgaatattttcaaacagaagatccatcaaattccgaaaatctttcgtaccatcagattattcttggaaagaccatgtcggtttacgacaagttggctgatgaattatttgaaaaaataactagcaaaaattaaaatgaatccgagacaggttgcagaatatatgttcgatcaggattatttttcccaatggatgaatattaaactgattgaagtcagagaaaattattgtttaatagaaatgcccattaaaaaagaaatgattaacgggctgaaaacggttcacggaggcgttacgttcgcttttgcagattctgcactggctttttcgtctaacaattctggagatgcagccgttgctttaaactgcatcatcaattttaccaaagccggaaaagagggcgatactttcagagcagaaagtattttggtcaatgaaaccagaaaaaccgctgtttacgatattaaaattaccaatcaaaatgaagaattggttgccaaatttgtcggaacagtgtacaaaattaataagaaagttgttgaactttaaagatattggataagaataaaattttaaagaagttttcaagcactcttttcattgataaagaaaagattagaaattattttaaagataataatctggagaactttaatgaaactttaaaagaatttgaaaatatgcgaacagacaccttcaatattatttggaataaatctgagcattcacaatttacagccaaagaaattcaaaacttatccgaaaaatatttaaaagaaaatcatgcttggattaatgaggatggaattaaagcggttaacagttatttactgtggatgtgttggcatgaaggaattttaaaagttaataaatagtataaacgaaaaaatagacaatttagcattgctggattgttaaattgaattattatgaacaacgtatacataatagattacataagaactcccatttcaaaattaagcggaggactttctgaagtaagagccgacgatttggctgctattgttattaaagaaattgtagcaggaaaccctgaagttcctgttgaggaaattgaggacgttattttcggatgcgccaatcaggcaggtgaagacaacagaaacgtagccagaatggggcttttattggctgggcttccttataaaatcggaggggaaacggtgaatagattgtgtgcttcaggaatgtctgcggtggcaaatgctttccgttctattgcagcaggagaaggtgaaatttatatcgcaggtggagtagagcatatgacgcgttctccttatgtaatgtcgaagccaagtacagctttcggtagagatagccaaatgtttgataccactttcggatggagatttgtaaatccgaaaatgaaagaaatgtacgggattgatgcaatgggtgaaacggctgaaaatttagcggatatacataacatcagccgtgaagatcaggataaatttgccctttggtcacagcagaaagctaccaaagctcaggaaagcggaagattggcagaagaaatcgtaaaagttgaaattccacagaaaaaaggtgaaccgaaaatctttgatacagacgaatttatcaagccgacttcttcaatagaaggattaggaaaacttcgtccggctttcagaaaagaaggaacagtaaccgcaggaaatgcatccggaatgaatgacggagcagcagctttaatcttagcaagcgaagaagctgtaaaaaaatacgggttgaaaccaaaagcgaaaatcttaggatcttccgttgccggtgttgagccaagaatcatgggaatcggacctgtagaagccactcaaaaactattaaaaagactgaatctttcattagacgatatggatatcatcgaattgaatgaagcatttgccgctcaggctttagccgtaacaagaaccttaggtttaaaagatgacgattcaagagtaaatccaaacggaggagccattgccatcggtcatccacttggagtttccggagccagaatcgttggttctgcggcaatggaactgcagaaacaaaataaaaaatatgcattgtgtacgctttgtatcggtgtcggacaaggttacgcgatggtgattgaacgggtttaatttgaaaatgtgctaatttgagaattcgaaaatgcttaaaaccgtcatcaattttcaagttagctaatttaaattaacggttagcctttgctgagtgaaatcgaagattcgatggtgtcaaacgcctttgcgaatgaaaaatatacatgaaaattttcaaaaaaactttgtgaaccttgcgttaaaaataattttcaaattaactcattctcaaattttcaaattaaaattatgaatatctactcatatcacggaattcgccccatcataaaaccttcagcttttgttcatccacaggcggtgattattggcaacgtggaaatcggcgaagaagtttatgttggtcccaatgcagtgattcgtggcgactggggaaaaattatagtaaaagatggtgccaatgttcaggaaaactgtaccctacacgtttttccaggaattgaaaccatacttgaagagtctgcacacatcgggcatggagcgattatccattctgggcatatcggaaaaaattgtctggtcggaatgaattctgtcgtgatggacaaagcggtcatcggagatgaatgtatcatcggtgctttagcttttgttccggcaaacttcagatgtgatgccagaaaattgattgtcggaagtcctgcaaagattatccgcgatgtttctgatgaaatgattaaatggaaaactgaaggaacaagattatatcaggaactggcaagagaaggaaaagatgctattttgctttgtgaaccttttacagaatatattcagcagattcctacgaaaattgtggattacagcatttgggatgatgtgaaataatttttcgtcccttactaaacctcataggtttttaaaaacctatgaggtctgaaaatataaaacacgtcatctccaaaacctatgaggtttaaaaatataaaacacataaatgaagaaaaataaatgtcaaacacagaaaattttgaatgtgaatatgtataccatatctacactcatgcaaatgggaaagatttaatttttagagaagaagaaaattataaatattttttagataagcttgcaaaatatattgttccgatagctgaaatatatgcatactgtttaatgccaaatcattttcatctattggtaagatttaaaaatctgaatgatattcttaatgaagatgagcataaatatttaatgaaacagtttagtaatatgttgaatgcttacgcaaaagcttataataaaagatataaccgaaaaggttctctgtttctggattatctgaagagaaaaaaaataaacgatgaaaaatattttatgaaattacttcattatattcataataatcctgtcaatcatggatttgttgaagatattggtaagtggaaatattcatcgtatcattcttatattaattgggctaaagaaagtaaaattgaaagagctgaaatgatgcaatattttgaaacagtaaataattttatagagtatcataagtcaaatgttgaacatgattttctaacaattgaataaaatagtgtaatgctcaatcaaacctcataggtttctaaaacctatgaggtttaaaaaagtgattaataataaaaaagaatgatcaaaaaacttctcattttctgcagtattctgtttgcatttcagtctctggttttcgcccagactgaaaatgtaaaaccactgactattggagaaatcagaacgatacaatctaaaattttgaatgaagaaagaactttgaacatctatcttccacaaaaatttgacaaaacaaaatcttatccaatcatttatcttttggatggaagtatgaatgaagattttattcatgtgacaggcttggttcagttctttaatcagatgtattccatgccggaaacaattgtggttggaattgcgaatattgacagaaagagagactttacttttcatacagatttaaaagatttgcagaaagattaccctacaacagaacattcggataagtttattggatttttagaaaaagaactgaaaccttatatcgaaaatcagttcaaaaccaccgacaactatttattcggacaatctctcggcggacttttagcaaccgaaattttgttgaaaaagcctgaactgttcaataattactttattatcagtccgagtttgtggtgggatgatgaaagtcttctaagacaggctcctcaattattatctaaaattaaggatactaaaaaatttatttacatttccgttggaaaaggagaacatcctgtaatggtaaaagatgcagaagatttatttgatgttttaaaaaaatcaaacaagaaaaactggacagtagaatataaaatgatggaaacagacaatcatgcaacaatcctacacagaagtttgtatgaaggtttggtaaaattgtttccgtatcaggaaccgaaaaattaaaaatgtagcaatataaaaatgtatctgtgtaaaatattgatacatcgttaaattaatatcatatggaaaagttaaaaaactatatctacggcgagtggatcgaaggaaacggaaacggaattcctttgtacaatgctgtaaacggagaacaggttgccatttccgacaccgaaggtctgaattttgaacaggccttggattacggaagaacagtaggctacaagaacctttcatccatgacgttctacgatcgtggagaaatgctgaaaaaagtagcactttatcttcttgaaagaaagaaaaaatattacgaactatcgtataaaacaggagcaactcacgttgattcctgggtagatatcgaaggaggtttcggtacattcttcacgtattcaggattggcaaaaagaatgcttccgaacacctcgttttgggtagatggagatactcagaaaatttcggcaaacggaacttttttgggaactcacattttaacgccgagtgaaggggtttcactacaaattaatgcttacaattttccggtttggggaatgctggaaaaattatctacatcattgttagctggtgttccttcgatcgtaaaaccttctcctttcggttcttatctaacgaacgcggtttttcaggatatgattgaaagcggaattcttcctgaaggggcggttcaattggtatgcggtgaaccgggaaatattctggattatgttcaggatggagattcagtattgttcacaggttctgcaacgacagggagaaaattaaaatctctgtcttcgattgcaggaaatgccgttcgtttcaatatggaagcagactctttgaactgttcaattcttgggttggatgcaaaaccgggaactccggaatttgatttattcatcaaagaagttcgtaacgaaatgacgacgaaagccggacaaaaatgtacagcgatccgtagaattatcgttcctgaaaacttaattggtgacgttcagaatgctttatctaaagctttagatcagacaaaaatcggaaatccgttgagtagagaaaccagaatgggatctttggttggaaaacagcagtatgatgaggttttaagaaaagttgatttgcttaaagctgaaaccgagttaatttacgacggaaagcacgaattgatagatgccgattacgaaaacggagctttcatgagtccaaaattattcttaaatgataaacctttcgagaaaaatatctctcacgatgtcgaagctttcggtccggtttctacattaatgccttacaaagatgccgaagaagcggctgcgttggcaaaaagaggaaaaggaagtcttgttggctcaattatctcgcatgatgataaatttatcgccgaaacgtcgtggaaaatggcttcacagcacggaagaatttttgtactgaacagagacagtgcaaaagaaagtacaggtcacggttctccgcttccgactttgatgcacggcggtcccggaagagcaggaggtggtgaagaaatgggcggactgaacggtcttcatttcttccttcagaaaacagcaattcagggttctccggatgttttaaccgcgattaccaaaatttatcagcagggtgctgagaaaaaatattcagacaaacatcctttccagaaatattttgaggaagttgaggttggagattctctggaaacagcaggaagaacggttaccgatgcagatattgtaaatttctctaacgtttcgtgggatcatttctacgcacataccgatgcaacgagcttaacaggaactatatttgataaaacagttgctcacggctattttatcctttccgcagcggcaggattatttgtttcagggaaaaaaggacctgttatcgcaaattacggactggaaaactgttcgttctttaaacctgtttatgcaggagataccattacggtgtatttaacggcgaaagaaaaaatcaacagaggggtaaaaggaagaaatattccttccggcgttgtaaaatggttagttgaggtcgtaaatcagagagatgagatcgtttgtgtggcaactattttaacgttggtggcaaaacagtctccttttatcgatttaaacttaaaaaatattcagaaaatgctgaatggattaacagattctactcagccaaactggggaaaaatgtcaccgcagcaaatgatagaacatctggagcatggtgtcttggtaagtcttggcgaaccggaagctgataagtgcttcactcctgaagaacagttggaaaaatggcaggattctttgtataaccacagaaaaatgccaaaagatttccctgcaccgtttttggcagatgatgaaaaactattggagttaagacataaaaatcttgaagcagcaaaacagtctttcattgataatttaaaaagatttgtgatctattacaaagaaaatccacaggcagaacacctgaatttcgtattcggaaaactgaataaggaaatgtgggaactgatgcataagaagcattttacacatcattttgagcagtttggattaatttaaatataaagcagcattctttaatgaattgctgctttttaattgtataactatttgattaaattgtttttaaatgattttattgctaactttaggatgcgaaatccgaaaagcataaagagtaggaacaatcattaaaactaaatcattatgaaaaacttaaaaaaactctcaagaccagagttgagagccattgaaggatctggtccaaactggtcttgtacaccaacttcgtgtcctaaaggaagctgctgtattcccggaagctggccaagtactccaagagcgtgcgttatttgtgcagattcttaaatgatacagataaataatgtgtcgttttaattagcctgtttcggttaaaataattctaaactccctttcagcttatgttgaaagggttttttataatcttatgttaaaaacttaatgatatttgatacccttatttttattccttattttcaggcttaattatatcataaaacaaaagaaatgaacgaaaattggctacagaaatatgaagaagtaaaagatgttcttatatgtccgacggatttggaaacctattttacgtctgatgaaattgcaggacagccattggaaacgatggagatcggaaatgtttctcttccttccggtaaaatagtggtgagagatcctcttgttgatctgaacggaaaccaatcgccctattttattcaggctccgaaaggtgattttcctgtaaccattgctgtggtaaaatcagaagactggggtaacagatatgctgttgttaaagtggaatttaccaaagaaaaccccattgtttacagggaagccttggttggaattgaagaactggaaggcgttactgaagatgattatttcggttttggcgtggatgcgggtttaggctgtattacggataaagaagtgcttccttttgtggataaatttgtggatgaaactgattttgacaatttttacgatgattatttcgccggactttttgagcaaagctataaagaccatccgaaaaatcaaagagatgccggagactggatcaactggaaagttccgaataccaattatcatattcctatgtttgcaagtggctttggagacggtacttatcctgtatattttgcttatgataacaataacagtatttgcggattatacatccagtttatagatattgaattagccttaagcgaagatggagatgaggatgatgtagattaaaaaagatcagccggataatttttttctgaaaaaccaaatatgacgaaaacttttgctgaggaagtagtagaatttaacctaaacttacattactccggaaatcttcccgatgattttcaggtgttaaatccttatcttgacaatcctgaaaccatgattgttatggaaaggttttatcataaatattacaatgatttcaataacagaaaatttctgatagggattaatcccagtcgtcacggagccggagttacaggagttccttttacagatacaaaacgtctcgaaagcgtgtgcggaattaaaatggaatctgctcatacgcatgaagtttcctcggtatttatgtatgatgtgattgagcagtatggcggagcagaaaatttttatcaggatgtttatattaattctccgtttcctttagcaattgtcaggaaatcgaaaggaagctggatcaacgccaattattatgatgataaagaacttttcagcgatgtaaaaaattttatgattgattgtttaaaaaagcatatcatcctgaatatcgacatttcggaagtctttgttttgggtaaaaaaaatgcagattttatttcaaaattaaataaggaagccaatttatttgaaaaaatgacagttctggaacatccaagacacatccagcagtacaaatccaaagagaaacaatggtatattgataagtacattctctcactgaaaaattaaaactccctgaatttctcagagagttttagaacggtgatattaaatatcgccagaacgagggaaaacatgataatcccccgattgctcaggggacatcatcacaatattatgctttaaaatctttcatggtacaatcacctatcttaatgaatttcatggttattagtttttaccttaacgataagcgtattattttttgataattttataagactctttagaagactttatcgtgtaaacaccttttggaagatcagaaatatcagattcgtttgttcctttttgtgtttcaattgtttttaccaattgcccgctttggctgtacacctcaaacttactgttatcctcagttttaatagtaagtggaccgcttgttggattaggataaatccctgaatcttttttcgatgatcttacttcattggcagctaatacaagtccggtatcttttacccatgtaaatgcatctaatcccatatactgataaccacctcctgcggtaatttgtagctgatcgataacgatattgctataattctgtccgttaagattagtcatgtctattaaagtatatccattcgttgtagcaatagagttaacaaaccctgtagtttttgtctgagaaaattttgtaactccggataatttacctgtaatagttaatgtccccgttacagactgcgaagtatttgctgctcctaaataaacccagaatctgtttactttaaataaattagatgttgtcttaatactaaaagaagttccggcagattggttacccgctccggagttatctatatatctgttgtcaattgcggtaccactccatccagtccccggataagaagcctgaatatcgtaagtatttacatgcgacagaatattgaatattactccattatcagtaaagcttgcgcttgcattagattctgtctcaaattgttccgtactggtctgtccaaaagaaaagaccgaaataaaaagaacagataaggtaaaaagtatagtacttttcatgattttaaatttttaggttgttaattattgtcttgatggatatataccatttacgcagataatataattaagaccaaggtaaggtggcatattgttaacaggcacattttgccctgtaaacgttactgaagctccattaatttgtgtattaggagccgcatctgtaaaacttggaacaggttgaaaatctcttcctgcatatgttcctgaaacagcaatcgaagaattacccgaaggagttgccgttgttgcattcgaagaagaaactcttagctggctgatcattgatggaagatttgagctaagaagagtattggttggtgttcctgctgcttctcccaaagcaatattttttcctgtgtttgaagttccagccccgataggtgttcttccgttaaggttaggcaaagcgaatgttgttcttccgtctccgccataagttgttcccaggatagagaaaagtgcctgattttggctgatacttagtattgcaccgttgcatagcatatatcctcttggtgcaaaatcacctgcaaataatttgatggttcctattaattcttcgtccatgattattgtattaatttgttagtacttaaaaaaaaattaaggtcttgaaggataaattccctctacacaaatgatgtagttaattcctaaatatggaggcatattattaaccggtagattctgtcctgtaaaaacaacagattgtggatataataccgtgtttggtgctgcatctacaaagcttggaacagccgtaaaatctcttcctgcctgtataccgcttactgcgatcgatgtatttgcagtaggcacagaagttgtcgcattagatgatgaaacctttagctggctcgcaaaactcggtaaattagaagaaagtaaagtattttgtattgttcctcctacctctcctagagtataagatcttccggtatttgaattcccctgaccgatcggagtacgtccgttaagatttggcagggcaaaagttctgataccatcaccaccgtaagttgttcctaaaagtgagaataaagcactgtactgtgcaatgcttagtaaagcaccgttgcaaaacatatagcctctaggtgcaaaattgcctgcgaatactttaactacgcccattaattcgtcgtccatgataatataattttcagtttttttaattcctactctgtttatggcttttcggatgccgccagaaaatctttaaaacttatgtcgtattgatatgtcaaagtaacggcaatagcatgatgcatggtagagtagaaaataccaaattgaagattccgtatttctacgtaatgagaattgtaatgaacaccgggagtataaaaacttaaataaaatcttcctcaaaatccctgtatttagtatttttgtgtaaatccaattaaaactaaaaatgaacgaatttgtagtatcagaactgaagaacaatattgccgaaattacattcggaactccgaaaagcaattctattccgggagcaattcttgaaaaattagcacaggctattttagatgaaggagcaaaagaagaggtaaaagccattcttgtaaaaagtgaaggtgaaaaagctttctgcgcaggagccagttttgatgaacttctggaaattgaagagctggaaaaatcaacaaaatttttcgggggctttgcaaaagtgctgaatgcgatgagaaactgtggaaaaatagtcgtggtaagagttcagggaaaaactacaggaggcggagtaggaattgcgtgtggagcagattactgtttcgctaccaaagattcagctttggcattaacggaaataaatttaggaataggaccatttgtgatcggaccgtatgtggaaagaaaaatcggaaaatctcagttttcagccatggcaattgatgcagacttcagatcggcagaatgggcagaacagcacaatatttatcattcggtttcagaaaccattgaagatatggatgccaagcttgaaaaattccttcagacactggcttcaagaagcagcgatgctttagctttaattaaaaaggtttcgtgggaaggaacagatcattttaacgaactgatgcctgcaagaattcatatgagtgcaagtctgattctggaagattctgcgaagaaaaatatcgaagccatcaaagaaagattaagagcgaagtaactgctgttatttttatgatacaaccgtcaatttttggcggtttctttattttaatctgatttaaaaaaataaaatttattatcttgtagattcaaaatggttataaatatatcatgatagcttaagtctaaaaatagcagatatcatgatgatcaaaaactaatacaatgggatcttacgaaatctttattttgctgatttgcctttcagcagcatttgcttttattaatcagaaatttttaaaactgccttttgtcattggtttgttttttctttctactgtgctttccgtagttgtactaagctcacagttatggatggatatagatgttcagaaaattaaacattatcttgagaattcaggactggataagcttattatagatgtttttctgggctttttgctttttgcgggagcattgcataccaattggggaaacctgcgttcgcagatcaaatccattacaagttttgctttgggaggagtcattatttccacaggaattatagctgttgtgttttactttgctgcaggacttttaggattacaaatagatcttgtatattgtcttttatttggtgcattgatttctcctaccgatcctatagccgtacttggtattttgaaacaggcaggagttcccaaaaagacagaatctgtaattgttggagaaagtttatttaatgatggagtaggtgtggttctttttattgctttactggatactttgccggtgggaagttttagctttggtcattttggagtgctttttattcaggaagctgttggaggaatattggtaggattggtttatggttactttctgcatttgcttttaaaagcagtagatcattatgaaaccgaaatattaatcacacttgcatttgtgatgggtggttattatattgcaaattattttcatatttcaggtgccttatctatggttgtaatgggattaatggtaggaaatttccgtaccagtgtttctatgagcgatacaacacaggaatacgtaaataaattctgggaactggtagacgtggttttaaatgctttattattcatcattatagcttttgtcttaatagaagtggattttaagacggaatatgtaattctcggtttgttatctgttattattgtactttttacgagagcatttctggtatatcttccgctgagtatttttcctaaattttttaatcttaacagaagcgatgcccgtattatttcatggggaggattacgtggcggactttcacttgctctggtaatctctcttcccggtagctctgcaaaagaagtattgcttgtagcaacttactttaccgtattattcagtatccttattcagggcttaacgataggtaaggtggctgcgtggagcaaaaaatctaatgattaaattttcaaaaaatattttgcagattaaaaataaataataactttgtaattcaaagttctttttatggaatcaaaaaactatcacgaagacttatcacacattcgctctatgatggagcgttcttccagatttatttctttgagcgggttgtccggagttgttgcgggattagcggcaattataggagcagtgtatgtctattttgtttttcagagagagggaattgattattttgatggagaaagaaatattttcggaccgtcattggtaaaagaacttgttgtaactggagttgttattctgggtgtggcattgctcagtggttatatttttacagccaacaaaagcagaaagaaaggtttgaagatctgggatgctacaactaaaagacttttggttacctttgcagttcctttggtaacgggaggtttcttttgtctggcacttctttatcatcatctttttgtatttattgctccggcaacattgctgttctacggactggctttggtaagtgcagaacgatacaccttaacggatataaaatatttaggttattgtcagattgttttaggattaatttccttattctttttaggatggggactggttttctggacaatcggatttggggctttgcatattgtttatggattgataatgcataagaaatacaaatagaattgtgaaaaaatgggggatatttttaatcattatttttgcagttgtgttcagcaaagcttatttattcaggatatttttttcatatgacataattaaagaaagaacggttttagatatcactaacgagaaactgaaaaatcggttaaaggaaatgggaagtaatacatctgtagaagatctcattcagaattctttgaaagaaactgcttctaaccttagtttttcatttgataaatgtgatcatgaaacggataaattagtagaaaccaaaaaagcaaactgtatcggttactcagcattcttagcttctgttattcagtttaaattgaagcagagcggactgcaaaatgattggaaggttcatcataacgttggagaaatttatttaatgaatgaaaatatcaacagacattttaattctgaatttttcaaagatcatgattttgtaaccgttgaaaatgtaaagacaaaggaaataatcggtgttgatgcaacagtgtatgattatttcagaatagacaggataaaattaaaatgataaatataaatcaactcaacaaagaattcgaaagccgtgtaagattgggcattatgtctgttctcatggtaaacgactgggttgatttttcagaaatgaaaagtctgctggaaattacggacggaaatcttgccagtcacagcaacgcgctggaaaaagcagcatatatagaagtgaagaaagaatttgtgggcaagaaacccaaaacatcgtatcgcgtaacccaaagtggaagagaagcctttacagagcatcttaatgctttggaaaaattactcggaaaatagagattaaatttttttatttttaaactttgaaatacaaagtacttttaataatttaaaatgaaaattatgactttagaaaaacaaaaaacaaccatcattttcgctgttcctgcattattgatgcttacggcattttttgccaacctttttgcagaaggctggaactggtcaccttccgatttcattattgccggagctttacttttcggaaccgcattctttatcaatctggtcattcgatcgaaaaaagctttgccttataaactgatgatctgctttgcgattttattagtcctggctttagtgtggattgaactggcagtcgggcttttcgaaactccttttgcgggaagctaatgttgtaaaaaaactaaaacataaatgaaccggaaaacatttttaaaaaagatctttcagctttctgtaataggagcatttcctcttctctattcatggcagattgaaccgttttggctggaatttgtagaacggaaacttccaattaaaaatttacccaaaaatcttgaaggaaaaattctgatgcagatttccgaccttcatgttggaacccgcttcgactggaatttcattatcgattcttttcagaaagctaaaaaatacaatcccgacttcgtggtgtacacaggagattttgttaatcggggaggagctaaagaaacggtagaccttaaaaaagtgatgcaacacgctgtgttgggaaatctggcaacattcggaattctgggaaatcacgattacggaaaagactggcaggatcttcagtcatccgacaatatctgcaatattctggaaggttttggaatcacaatgctgaataatgcgcaacaggaaagcaacggactcaattttatcggttttgaagatttatggtcgcccaattttgcaccgcacaaagtgatgaaagattatgatccttctaaggcgaatattattctctgtcacaatcccgatgcctgtgataaagatatctggaatggttatcagggttggattctgagcggacatacgcatggaggacaatgcagaattcccggagtcattacgcctctgcttcccgtgaaaaacagaaaatatatttccggagaaattgatcttgaagatggaagaatgctttatatcaaccgtgctttgggacattcttttcaggttcgctttatggtgcgtccggaaattacggtttttacactcataaatgatgaaaagtaaatataacaacattgcattgatttatttctctgcaagttggttaatcggaattttaattatagcaggcatgatatttaaaattagtgatgatcttgttgtgactttgatttttttatcagcaatgaatctgattattaatctattttcaatgattttactgtttgcttttatatttatttttcctgaaaaccgtgttcaatttaaaaattctttggtattgatgatgtttaattttccaatcatcttttttctatacttagccatatcattaacttaaaataacataatatgaatgaaaaaacaatcataacaatcggaaaaactctgttttggctttctttcggactgggaaatatttgtcttttcggatatattttcacaaaaagtaacagtttcatagaaggaggacttctgttattaggatggggattctatattaatcttatagcagttttaatcctaattgtttatggaatttttgataaatcgaagctgaatgtttgcttaaaatcggcaggtataatgttactcaatataccgtttgcaatgatttacatagtaattggaatgagtgtaataacaatttaaaatataaactatgaaaaaaatacgtgtcaaatttcttctattcgtctataataaaacccagaaactgtacagaacctatttcaagaaaaagaaaaggcagtggcagtttaccgaaaaacaactgctggagtttcaggaagattctctgggcagaaaactgggagaattttataaaaaacatggtttcacgatgatccccaaaatggaaaatcacgatgttcatcatcttattacaggatgcggaaccaattttgaggacgaaatcgccatgcagtttctcctgttaggaaacggaaaactcaacgcccatcttttggctgcgattgttttgggaagcctcattttaccggaatattacaaactctacataaaagcctacaaaaaaggacaaaatatgcgtccgttttaccagtgggattttgaagctttgctctggcagaattttgagcacctgaaatatttcattcagcagaagaataccgctgttttatattaattatggaaagggtaaaatttagtcccgtcggaaaaagtctgtttctgatttcgtggctgcttggaaccatcatcttactggcattctggatctccgaatcttggttttttgtctggctcggattttattatgtcgttattgccgttgttatcaacatgattgttttctgttccgaactaattactttcttaacagatgtttcagataaaaaatctcacggaaactcagctttgctgattttgttgaatattccgattgccgccttttacttttttattttcatcaacatttaaactaacctatgaaaacacatcactatatatttcttacgaccttgctttttgtcattgtattttatgatcagaatgtaggtctcaatctcggaattatcggaattatttatgccgtgcttactttcctcagaacaactgaaagaaaccgaaccaaaacgtttatttttcttttcgcaacgagcattatttcgagtgctgcgtttgcgtggtacggagattttccgtcctttttggcggttgtcagttcactgttattgttaggatacagatcccgaaaccgcaggatgaaaatccttttgttggttccggtttttgtgacgaactgctttacagagtttttcagaatcctgaatttcgatgcatggcttcccaaaagaaacgtttccggtttgtggcagaaaacactggcttttgtaataattcctttaattctgatctcggttttcttcggaatttattccgcaggaagcgatcattttgccaatttattcaccaatgtggagcttgatgtcaatttctggcaattgttggcaatgatctttttaggcttttttatcgcattcaattactggaatttcgccgttgaacggtttatttacaaaagcaaccgattgctggatgatcatttcggggagaaagataaaattcagaaagtcacctattcttttcttgatctggatgcagaaagaatgagcggcgtaatttctttatttgcgctgaatattctgctcgtctttttcatcatcacctacaactatgaacagttctacgagtcggtaaaaagtcccgttaaactttccgaagaaacacatgaaagagtaaatgcagtcattctgtcgatcatcatgtcaattctggtgatcatgttttactttaaatcgaatttcaattttgatccgaaagccgtactaatgaaaatgttagccaaagtctggattttcctgaatgccgttctcgttatttctgccatggtgaaaaactcagaatacatcatcaattatgggtttacctacaaaagactgggtgtttatgcatttttgatattggctttaattggcttggtcaccacttttattaaaattcagaagcagaagagaaacgttttccttttcaatacgatggcatggtatatttacggagtaatccttgtttgcagctacatcaattggggcagcatcattacttcggaaaatagcaagcggaaagattttgctttaaactaccataaaactcaaattaatttcagtgagaagcaattactgaattatgccgaagaacatcaggataatgccttaaaatccgaaattctgaatttagaaagagtgaaattccagaaaaatgaaaaatttctttctcaggttttgtattatcagaatttaaagtaagaagatcttcggtcaaacctcacaggtttcaaaaacctgtgaggtttttattgtctgtaaaaattttaattataattaattttaaaaatgatcagaaagttaaaaagtaacaaaagatttgaaatcactttattgttgatattaatgacgcttttttgtttcagtctttcacttttcagatattacatcagtgaaacgaaagtgtttttatttcttaactggaatttgtttctcgcctggattccattttttatcagcagttttttattgatttttaaaatcagaagtaaactgtcacttattgtcgcaatcgctgtatggattatattttttcccaattccccatacattcttacagatctttttcatctgagaagtagaaatgcaatcccgatttggtatgatttggtggtcattctttcttatgcatggacaggattattttgtggattcgtgagtttgcttgacattgaaaaactattgtcagattattttaaaccaagaatcatcaacatccttacgttttcgtttttattcattgcaagttttggtgtttatctgggaagatttttacggtggaacagttgggatgttctgagtaatccttttggtctctttaatgatattgccatgagaattgtttatccgatggactatacaaaaacgtggggcgtaactgtcttaatgggaataatgctgaattttatgtactttatgatgaagtctgtgaaaaatcttgatcaggaaacttctattgttaaaaattaggaaacatagttttccggttaaaaggaatactataatggaacaattttggcatctgaataaactttaaaaatcaagacggcttagatcgtgcttaaaatttattattatgaaaaaatccttattgctcatcccgttacttattgtttcatgtcaaaaagaatctgctccggcagaaactcagaaaaatgattcagtaatcgtaagcgaacaatctgatactgctccgaaaatggattccgcagccgtaaaaatgaaggattctgtgatcaacaacgcgccgaaaaccaaagaagttcttaaaaccggagtcatgagaagtgtgaaggacggaaagattaccagaacggtagatgcagaacagtttccgttaactttaggagaagaatttacaaaagacggacaggaatttattcttaaaatcatcaatttcgatcaatctaaaataaaggcaaaaatttcgaccaatgaaaaggatttcaacatccgctttaaccagatcaaacttcccaacggagattatgacggacctttcggaagagaaattacatatgatgtaaaagataagggcgaagtttggctgatcatcggtaaaagcaatatggcttcaggaaataccaaaggcagttttaccgtaagtgtagaataattttcatcattttggtatagtttctgcaaagacaatgttaaaatttatcattatgaaaaatatatttttgacggcggcagtagcttcagtagctctgataagttgtggaacggtgcagtcgttggttcagaatacatttccttatacagccaatgtgttagtttccacaggagttcccgcagataaagaagtttcttccacttccaccgcttctaatgttcagacttggtttggtgggaataacaatgcaaaaataaaagacgtaagaatatcggatgcaaaagtttctgttgtttctcctacaggaggaagcctgaatgctttcaaatccataaaagtatacatatcatccagcggaacggccgaaagactggttgcttcgagatccaatatttctacagatgcttcaagtttaaatcttgatcttgcaacctcaggatttttggatgaggtggtaaaaagtacgggggttaccgtaagaacggtttatgaactgaagaaccagacaagttctgacatgaaccttagaatcgcactaaatttcagcagtgttcctgcaaattagtttttttataaaagtttattttaaaaaaacgtctttcagatttctgaaagacgtttttgctgttttttatagaaaagattatttaaaatctaccagttccacatcaaaaataagggttgctcccggaggaattacgccacctgctccgttgtctccataagcaagatcagccggaatatagaatctgtattttgcacctttcgacatcagctggattccttctgtccagcctttgatcacccctgaaatatttaattcgatcggttgtcctccgtttttatccgtagaatcgaaaacggttccgtccattaattttccggtgtattttacgtttgcagtacttgaagcagttggttttgctttaccatcgccttctttaagaacttcatattgtaaaccgcttgctgtggtttttatgttcttgtttagtttatttttagctaaaaactcagcacctttctttttgttttcctctgcttttacttttgcttcagcctgttttttttcgttctgcttctgcataaagccctgtaaaaaagctcccatttcttctttcggaaataaacttgccttatctccgaatgcatctttaaaaccttgtgccaataattctggatctgccggaaagccctgcttcttcatgttttcagcaatatcaagaccgatgtagtaagacgctttctgctcttctgtgtaagttttctgagcgaatgcaagatttactcctgttaaaagaattaaggtaaataacgtttttttcattgttgaatgtaaatatattttctgcgaatttaagcttttgtaacggaatccatcacaattgttaccggtccgtcattaattaacgaaactttcatatctgctccgaagattccgctttcggttttcagtccggattttgaaatttcttctttaaaataatcaaataagggaatcgctttatccggctttgctgctttaatgaaagaagggcggtttccttttttgtaatcggcaatcaacgtaaactgactgatgcataatatctctccctgaatatcctgaacggaaagattgagtttgccatcttcatccccaaaaatcctgaggtttaagattttctgtacaagccaatctgcatcgcttttttcatcattttcatcaattccaaccagaagcattagtccgtttccgatttccccgaccacttttccatccacttttacgctggattctgaaactctttgtatgacaactttcatttctaataataaatatttaaaattttcccagcaggatcataattgtaaagatacgttttcggctgtacattggctacagcagtgggttgtccggttaataaaatccattgggcattgtctttcgggcagacaattctgatgttgtcctgaacttccagagtggtattgttgtcgggacagatgtgaggggcgtttctgtcgtaggctttaaaagaattgtccgatgctcttaccacaattaatcccttcgttccggattgctgctcattgatgtaaacccagcctccaacctgattcagagcgtagtaagcaggaaggttcagatttagtgtaacattgatcggattacttggaaagcaacttacggtgtcttcacggcttccgcaggaatgtatagataaattactgaaaatcaataatgtgatgatagataatattgaaaaagtttttttcatttcaatttaaatttttatatatttgtaaaaattaaacgattattacacgaaaacattgtccggcaaatgtcggattatttttttatactaaaactaaattttgaaaattatggcaagctatgttacaaaggagggattagagaaaatgaaagctgagctggaacagttggaaactgtagagagaccaaaaattactcagcagatcgcagaagcaagagacaaaggagatttgtcggaaaatgcagaatatgatgcggcaaaagaagctcagggaatgcttgaaatgaggatttctaagctgaaagatgtaatctccacttcaaaaatcatagacgaaagtcagctcgatacttcaaaagtttcaattcttaccacggtaagacttaaaaataatgcaaccaatcaggagcaggtgtttacactggttccagataacgaaagcgacctgaaatccggaaagatctcagtaaatacaccgattgcaaaaggattgcttggaaaagcggtaggagaaacggcagatattacattgccaaacggaaacaaactgtcttttgaagtattggacattaccctgtaatgaaagaaaaagaactgaagtttaatttctaatcaaaaacatttttaagtaaaaatgagcacaatattcacaaaaatcatcaatggcgagatcccctcatataaaattgctgaggatgaaaactttattgcatttctggatgcaatgcctttggtaaaaggacacacattggttgttcccaaaagagaagttgatttaatttttgatctggacagcgaagaatacaaaaacctttggggtttttctcaggaagttgcccaaaaaattaaaaaagcaataccttgtgtgagagttggtgtggctgttgtaggattagaagttcctcatgcacatattcatctcattccgttaaataccgtggaagacatgaattttaaaaatgagcgactaaaacttacgggtgaagaatatacagagattcagaactcaataattaattcttaaaaataaaagaaactcgtaaagcagatttttacgagtttctttaatctatactttatatatttagatataaaaaaatgaattcaaaccaatgttctttctgcggaagaaagagaaatgaagtgcagatgctgatttcaggtcaaaacggctttatttgcgaaaattgtattgagcaggctcatgcaatcgtgaaagacagcagttcaaaatcaggttatgctccagcagaaaatataaacgaacttaagaagccgaaagagattaaagaatttctcgatcagtacgtaatcgggcaggatcaggcaaaaaaacaattgtcgattgccgtgtacaatcactacaaaaggttacttcacgctcaggacgaaaacagagaagtagagctggaaaaatcaaacatcatcatgatcggtgaaacaggaaccggaaaaacacttttggcaaaaaccatcgccagagaactcaatgttcctttctgtattgtggatgctacgattttaacggaagctggttatgtaggtgaagatgtggaaagtattctttcaagacttttaatggtagccgattatgatgtggaaaaagcggaaaaaggaatcgtttttattgatgaaattgataaaattgccagaaaatcagacaatccgagtatcacaagagacgtttccggagaaggagttcagcagggattactgaaactgttggaaggcagtattgtaaatgttccgccacagggaggaagaaaacatccggatcagaaatatattcaggtgaatacacaaaatattctgtttattgcaggaggagctttcgacgggatcaaagagatcattgaaagaagaatgaataagcaggcaattggtttcagttcggaaaaaattaacaaaacggatgaagacgaatacatattaacaaatattaatgccatcgatcttcgttctttcggtctcattcctgaacttttgggaagattcccgatcattacttaccttgataaacttacgaaagaaacaatggtaagaattatgaaggagcctaaaaattcaattgtcaatcagtttatcgaactttttaaaatggatggagccgatctgaaatttacagacggggctattgaaaaaattgtggaagaaactattgaaaaaggattaggtgcaagaggcttgagaggaaccaccgaaaaggtgcttgaggattatatgttctccataggtgaacaacaggaaatagtattaacggaggataatatttttgttaataaataaaatatttttgttttttagtaaaaaaaacataactttgcatttgagatattgtattaacacacaaatatttatatacaatgagaaaaagtttatttgctattggtttattggcagctacttattctgttcaggcgcagaatgttctagtacacgtagatgacgctgctactacgtatgtaagtgaaggtactttggtatatagtggaggaggattccagaccagaggagctggtatcgtagatgttcatgggaacattatggtagatgcttcttcagcggacgctttcaaaacaattactactggtggtgctaacaaaacagatggtggaaacatcgtcttaagacttaatacaccaggaagttacgattcttccacttacggtcagctttacattaatggtatttctgcggcaaatcttaccggtgtggtgagtaaagagtacaggacggctaaaaatggtaacggaaactatttccagcaaatggcattaccttttgcaggaaaagcgtacagtactttatcaacagagttgaacaagtctttcggtactacaagaactcttaacaacccgggatatgttaataatgatttgatcttatcatggaataacgcaaatgccgtttcagatcatgttacgaatcttgccaacacaactcctaattttccggcatattacatgttaggctcgagatcaaacaatcttgatttaagtactccaccatcaactttacccactattgcacctactgctacaggtagtgtttatacattaagcggtgctccggtgcgttctgaagatcttacagccgtgagtttgcagaatgcaggaaatgtttcttttggaacgaacggtcttggatataatacttatggagagcaatatgcaacttatcttcaggatcagttctctaatacaacagggaaattcgtaggaaacttcggtaaaaatatttatcagtttggaaatccttactttactaatcttgatttatcaagaattggatatgttgaaaacactggggtaacggatggaaatgctgtgtctaatatttggggagtaaaatatacaacgggaacagtcgttagttatgctggaggaagcaatggaggtggtggaacatacactaccggagctcaggttcagacatatactacaggaggagttcctgttggagatacaggtttacttatcaaaccaatgcagactttcgtgttgaaattaagagacaacacagcacagacattgaatttttctactcttagaagattcaacagtactgtaagagctgcaaatgtagattataatgtaaatgctgctaaatcttcagcgaatacaaccttcggacaaaaaggaactaccaatactgtaaaacagcttggagtaattgctctggatgttaatgggaatgaagttggaagaacttattatgtggtaaatccaaactttacaacaggacaccagacatcatctgcaacaacagttcaggcttctgctacaggaggggatgttatcggtacttttgaagaagctccaggcggaggttatgataataacaatcttaactattggttatatattaatgaagctaacgaagttaatttcttagggaagaatgttaagctagttaattataataccaatgtagttaaatcttataaatttgaagttaaagaaaacggagaattggtaaataacggagtacatcagttatcttcaggaaccggcttctattataaagcatctaacggaagtttgcagcaggcaattcagggaggtaccacttcagctatcgctactgaagcggatctgtactatggagagccatccggtatcgtattagcaacaaatgatactaaatcgccatcaagaacattggttgtttacaatcctgcaattgataactatatcgttagatttgatcctaattggaaaaaagcagacatcgaagtttatgatatgagtggtaaattagtaatctctaaaaaagctgttgagacttctagagacttcgtaattgaattggataaaaatatcaaaaattcttacgtagtaaaagttgtttcagacaaaggagatattgttaacacaaaaatcttaaaataattgaatatgaaaactattaataaactggtctctactttttttctttttgcaatattatgggtgagcgcacaggcaccgccaaaccctggtgacgggggaaccggaggatctggttctggaggtactgtagtatcctcaccgatagacatgtatgtgtatgcattaggaattattgctgtattgtttattgcattttttactaaaagatatacagcgaagaaagcataaaattttattaaaataatattaaactctctgattactcggagagtttttttatttttacgctatgaaaaaaatttttacaatatcagctttagcagctgcattttcattacaggctcagtttacagtctccattcaggctcctgccgattttaaagaccaagacgcaattttatatactctaaacggttctaaagatattattgtaacgaaagaacaaagtaaaaataatacatggactttcaaatatcccaagaattatatgggaatgatgaaagtctattttcccaactccaacaacacgttcaattttatttctgaaaataaaaacgtaagtgttaagcttgaaacgcaggctaataaaataaaagatattgtttatcttgatgaagctaatgatatcatgagtaagcttcaggaaggctcacagaagaaggaacttattctgcctgctttagctcagatcaaagaatattataaagacaatacggagtttggaaaggcattaaagactgagatcaacagactttccgggaatgcttcaggaatagatcaggcacagcatccgtttatttatttttataataccaactacagtaaatttttgtctggcgatgcttctaaaaaaataaatcaggaagaaatcatcaattttattgataagtctaacgatatgttagaaacatcatcattattaagacctattttagtaagctacctgaattcaggtggtaatactaatgttacagcctcagtggataaacttttagacagattgaaagtagaaactccaagaggacaaacagtactttccgaattaatcgatatttttgatgtatacgatatgcaggatttcaaagataaatatcttaatcttgctaaaaatctgaaatgtacaattaccgacagacttgcttccacattaaaatctaatgccaacgttgaaatgggagctgtttttcctaattataagtttaattcaccagttaatactactgctaaatctttacaggatattaaggccgataaaaaggtagttattttctggtcttccacatgttctcactgtgagagtgaacttcctcaattattggctaaatatagggatttgaaggctaaaaatgttcagattgttggtttatctttagatgtggataaagattcttattctaaaaagattgcagcatttccatgggtaaatgattctgaactgaaaggttggaacagtacttacgtagatacatacaatgttcatgcaactcctacgtattttattttggatgctaacaataagataatcagcaaaccagagcatgttggtgatgttttggaatattttaagttaaaataaatttggagggagtaaatatttttgtatatttgcaccaccaaaacggcgaggtagctcagttggttagagcgcaggattcataaccctgaggtcacgggttcaattcccgtcttcgctacagatgaataaaaggtttcgagatatttcttgaaaccttttttattttgctaaaacaatactaaaacatttttagcctgttacaaaagggatcaagcggatcgtcaagtgatcaatttttgaaaaagttcatacggatcacaccttaactttctccttatacttttagcttgtgcccacttcttttcaataggatttaaatcggggctgtagggaggcagaaacagaatagaatgtgcacttttttctatggcagcaatactatcagatcttttatggaaggttgcattgtccattaccaagactgaatttgcaggaatcgagtgaagaagctcctgaattacccaggcatgaaaaacatcggcattgatgtttccttcaaacaatcctacattgaggatattaaaatccagaatagctccaatggcgttcactcttcctttattatgccagtctttaaccccgtaagatcttgttccttttaagctgtagctgtaatcccttggtgcatcggtagcaaaaccactctcatcaatatagataatgtttctttgttccaactgttgataatgaaacaaatgattttgaaattcagctcttttaacaggatcagacttgggatgagtcagtgttttttttaacacttatatttaaacgtctaagggcatagagaatacaattggggctgactccaaagaaagcagctctttcatattggtaagcatcaggaaaatcttctacatgtttctttaaagcttccatatcgatcttcgtagcgggtttatttcttttcccaacaggaataaggttttgtttccagcggaaaaaggttcgggtacttattccaaaacgtttacaaacagcctgatcagtaagtttttcctgttcttttattttaaatacttgtttgcgaaagtctaaactataactcatacagctaagataagactttttataatgagcctgttataaagtcaatttgtaaaaagtttgactattatatattaaagattatagctgccatttctcccttcatttagtgttttcagataaaactcaaacattagtttaaatttccccaaaatattattacagtgtatcagtcttttacgtttaaatatgaattaaaaatgaaattaaagttaacaaaacttgttttgcgttacaataagttgttatctttgccccactgaaaacgagagttgatcagtaagcgcagaagagcttttagataagcatataatttacgattcctgnnnnnnnnnnnnnnnnnnnnnnnnnnnnnnnnnnnnnnnnnnnnnnnnnnnnnnnnnnnnnnnnnnnnnnnnnnnnnnnnnnnnnnnnnnnnnnnnnnnnaattaactctgctttaattgcatcctgaccattaacttttatttttcttaaaaccaatcttccaaaacttgtgtcagggttaagttcatggtagcttaatctcaatcttaattcattaggctggcaatcaaaacattttggtgcaccgtaatttggaactaaagaatttcctgaaatagcgtaatccgtataatcagaataactattgctgagatacggtaaggtattgacaataatattattactttctttatattctacacctccaacaatgacatcatcataaattttcccattatataacttcactttttttattaaaacaagttttatggatttattaccattattataaagccatgttccgttgtaataatcaagttcattatcaatatctttatagtattgacctacggaagcagtccaatactttccctgatcttttatattgataatttctgtctgtccactgcattgttgataaaatgcgcatagtataagtataaaaatataatttttcatatttaatttttttttaattacaaggtataggttttacgatcccgttttctaagattaatttattccaagttgttaaatcttcatcggctttgtataaagatataccaaaattggcaaagcgttttaaaaatgtactttctctttcgggatatttctcggtataaaggtcagttaatttctcatccattttgtctaacattttttcccttgtatcagtactttttattttcggattattttgcacatcctgcgaaatggcagcgaacagcacatcaggatcatctattttcagggcgtatgtctggtttacgccgttatcatctttacaaactataataattactacgtcatgtttgttttcttcataaactttctgataaaaataatacagggtaaacacatccgtccagctaaacatcggtacggctccgggatagggatgagtatgaatactcccatagtaatactctccaaatttaactttaattttcaaatctgttcctaccggaagatcaggactgctgtatactccgttctggtcttttacaaggcttttaccgttttcattgggctcactcagctttccctgcaatgtcgtaatgctgggttttatatttgcctttgccggtttataaagatctttcagctcttcgcacggtgttgcaagataagcatcataaaaatcctgccatacatgagtaggatgatccttaaaatactgaaggataaacttcacaaaatcctgcacttcctgatctatccccagatcattacaaacagaagggttatatcctttcactgcaaggtactgataaatctttaaccggatattataattgccgttcaactgatcaatctcgccctgattgagatccaaaggattgcagattacatttctcggtctttggataatgtagagaggtgctgttgtgggcagggtgatgacaggaggcgtttcgccgggaggaatcgtattgtttgcgggagcccctcccgtggaagttcctgtgtttcccgctgttcctccctgcgtttgagatgccgaccctgatgtacaggcaggatcaaaacttaccgttaccgtattgtaaggaatgatgatattataagcatcacaatactctccattggtatgatgataacccggaacttcacaatccatataggttaccgtgtaggtagagcagcccatagaaaaagagtctgtaaaaacctgtaaagattctccatttccggaagagctttcggttatttttaccgtctggtaagagttggcatctatagaaaagtcgggaagtcttctgtattttaaaatgtatttttcggtaacctgattattgatactttttaaaatcagcttttcttcaattcctgaagaaggatctccaataatgtagaaagagtgatatttcgcatcaagataagaaacctcttcaaaggtatcggtatagatttcataattatcctgtactgccgtatgtttcgaaagggatgaatttccaccacttccggtattaagataattttcaatcctgctgacactgggtttcagaaaacttcttttttcataatcggttttgtgcaggatctgggtttttacattgtctttggtaagctgataagattggccacccgagctgtcattatttatataatctaattcttcccgacaaccgaggagaaagaagatgaacgcaaaaagcattaaaaatttgtttttcatgatcatttgtttttttataagttaaatataattctttttctatatagatgcattattttgtctttaggttggaaaaaattaaaaaatttcgatctatatatgaacaggaacaaaactaaaataaattacttattacataattcacttttacggaaaaattattacttttacgaaaaatatcattactaacatggaaaagattatcaaaaaaatagcggagatccgcagtaaaaaaggtttctcttatgaaaacatggctcatgatcttgatctgagcacttcggcgtatcgtaaaatagaaacgggtgaaacaaaactgacggttgaaaggttggttgatatttctaagatcttagaaactcctttaaatgaattcttagaaacagattcacaaaaaaattttaaccaagaaaacaatgataatgcaagtggatttcaaggttttgattataagacttactacgaatattctgaagtatcaaaaaaattaattgaagtttatgaacagcagatcaaggatctgaaagcggagattgaggtattgaaaagtaagtaggtttgcggatgcttcgacaatttcagcatgacattgcgaagactaactgaaataaaaaagagagctcactaattccgtaaagctctctttcagtaattttttttcagatgcatcgttattgttttatgtctgtcgtctttttatcgttaaactggatcagccagtcttcaatttcatcttccagataagaggtctgaagaatcatggcattgatgaagtcatcgggaacaggttcgtctgttgcattttcaagattccaaagttcattagacatattttcatactcggaatagacacgtttgaagcgtgaattttctctttctagagcttcaatattttgttgctgaagctggaattttctgtatttgttttgacgtttcatacaaatattattaaaatgtggtcgtaaaaatttttgatcgtatgcttctaatcacgcattacaagatagaaaaaaccatcaacacaaatagttgaaaatgaatttattatcaggtcaggtttacatcattctgaaaattaaatttagaaataattttgaatctaaaaaaatatttaacatctttttttatcggtttaacatataattataaatttgcatatcataaaaatcggatgagagatttaatactacgtcagaaacaggttttgttcttcatcattgcaggaggactcagtgcggttgtggaaatcgggagttttaaactcttcagcacttcccttcctcagttttttccgcgcgaaaccaatttccacggaatccattatccgctgagtaatattttctctactagctgcggaatcatcaccaattatttcctgagcatctggtttgtttttgaaagaggaaagcattccaaaagaaaagaatttgcctattttatgatggtttcttttatttcaacattattaagtctcggttttttccagattttctacagctatatatttaaggataatatagatttgattatttatacgctgagtccggaaatgatcagtaaaattgctgccattctgctggtttcggttttaaattattccatcaagaaaaaagtaatctttaacggataggctgtgacgaaagttttaaattacctctggagattctggatgctgatcttagcatttgtcttcaccatccttttcgggattccggtttacattttatcatttaataaaaaacattataaatatgcttaccggtttgtacgatggtggagctactgtatttttttcgggatggggcttcggtacgatcttacgaagctttctgatcagaaattagacaaaaaccaacagtacgttttcatatctaaccacacatcgattatggatattatgctgatgtgtattttgtgtgcagatcatcctatttgtttcgtaggaaaaaaagaactggtaaaaattccgatcttcggaaccatatataaaaggatctgtgtaatggtagaccgtaaaagcgcgagaagccgcgccgatgtttaccggagatgcgccgaaaaaatggaagaaggaaacagcattgttattttccctgaaggcggtgttccggatgatacctctattattctggatgaatttaaagacggtgcatttacgctttcttcaaaacacaactctcctattgtggtctttactttcgtgggattaaaggaaattttcccgtttgacaattccaaaggttatcccggtaaagcaaaagtttatttcaacggaattttaactccttcagaatcaccgaaagaccttaaatcatcctcttttgagacaataaaaaaaactctgttaaaacactataattaatagaaataatatatatttgttttcagaaattttcaacaaatatgtcaaattattctaaacaaaccaattggggacaatttatcccattggttactgtattttttttctggggatttgtggcggcaagtaatgacattttgatcccggtttttcaaaaagcctttaatttatctcaaaccgaaagtatgcttgtgcagatatgcttctatgtggcatatacagtgggctctttgatttatatgctggtctctgcgggattaaagcaggatctggtaaataaaataggctataaaaacgggcttatcgtaggactgcttatttccgcagcgggaactttactgttctatccggctgcgaatatgcattctttccctttaatgatctccggattatttatcgtgggactgggcttctcattgcaacagattgtagccaatcctttagccattgaagtaggaccttctgaaacgggttctcagagattaacaatggcaggaggaatcaataatctcggaaccacaatcgggccccttattgtttcttttgcaatcttcggatctgcagcagcagcgaataatgatgtaagtgttgaaagtgtaaaagttccttatcttattcttggggttgcgttcgttttagttgcaattatgcttaaattttcttctctgccggcggtaacgcctaccaatactgaagaaagtaaagaggatcttataaaaggagatcacagaaaatcagcttttgaatatccccagctaattttagggatgatcgcaattttcgtgtatgtaggtgtagaagtttccacagcatctaatcttcctgcgtatatggaaaaaagcttaggtttcgaaacaaaagatgtagcaccttatatctctttatactgggcttctttaatgattggccgatggacaggtgcggttgaagcttttgacgtaagtgcaggtttcaaaaaaatcttaagatttttagctccttatcttgcatttggagtattcttactggtaaatgccattgcaaagcacgatctgtctcatttctatgtttacggactgattattattgcaatgattatctgcgatattatgagtaaaggaaatcctgcaagaatgcttttgatcttttcggttgcaggtattaccgctttactgattggtatgtttacaaaaggaatggtttctgtatatgccttcaccagtgtaggtttattctgctctacactttggccttgtatttttgctcttgcgatcaacggtcttggaaaacacaccaaccagggttccggattcctgatcatgatgattatgggaggaggaattgtaagctttattcagggctatgttgccgatatgacgaatattcacttcagttatattgtaggagtaatctgttttgcttatcttgctttctatgcaataagagtaagcggaattttgaaatctcagggaattgatcttgacaaaatcacaaaaggcggtggtcattaagaatacaaatatattatataagaaaaggttttgggcaggtttattacttgcccaatttcttttgttttatgtcttctcgaaatctgaaattatgatttctttttttgaaaatgtttttgaaattcagaaaaaaattcatcagacgttcttctcatggatccctttttcttcaggcgatgtactttattttttacttggaatttttcttttgtattgtatcattacactatttagaaagaaaagcagaaattcttctttattcaaaatcttattaacgtttaatatcttttattttctgtatcagatattttgggggatgctgtactttcagactccggttattaaaaaactttctagtcaggaagaacctactgttgaaaaagccaaaatactttctttaaaatatcttgcgctgtgcaagaaaaccagagaactgacttccgaagataaaaacggagttttcatcataaaagacgtaaaagccgttcaggaagaaattctttcccgacagacaaagctcccgaaaaatatttcaggcaaaaaagcttgtgaaattaattccttcaaaccaagcttatttaaaaacgtaatgaatttcaccggaattctgggatactataatccttttactgctgaagctcaatacaactctcagctgccgcacagtttaattccttttacttctgcacacgaaagttcgcatcagcttggtttcgcaagagagcaggaagccaattttgtaggatatctcattggaattgattcggaaaatacagatctccgatacagcacagaatattttaccttgaaaagccttttgaattatattgccgataaagatcccgaatttgtaaaatctgttctgaaaaattattctccatctatgaaaagagacagagcttatgagaaagcttttgtcttaaaacatcagggtttgctggacgattttttcggctttacgaacaatcttttcctgaaaagcaatcagcaggaaggctcggttacctactcctatttcattgatcttctgatgaattacgaaaaggaataaaaaacaaaagaatcgtatcaggcgatacgattctaaaaacacaaatgatgaaaaaaaatttattaccttgacttgttccctcattcaaggcgatgtaaaagtacgatatttttcagaaatacaaaagtaattttactttttttaaaaactttatgaaaactttatgaatttttaagtttttttgagttcatctgatttttttttgattcagaataaatttgtgcagaatacacaaaattataatttaatattctttaaattttcctttattaatcaagatttaaaatttttaatcttaaaaatagatggtgcctgatattattttaccaacagtactttcttttatcactataaaaagtaattcaaaaaataaaaaaagttgagaagcttcttttgcctctcaactctttaactaaatacaaatctggaaatatctttgaatcatttctgagattttaaaatttcattttcttttttaagtaattctatatctcttttaagcagagaaatataatcatgtaagttttttagtacagaatttagtatattatagtttgacttatgatttccaaaatcatcgttaaagcttgaattatcattaaaaagaatttctgaaaactcagattctttaatatcatcaacagaaacccccaatacttttgccagtttctcccattcatcgtcataaatttttgatttcccattttctttacgcgaatagctggaaggatctgtagataatatttttgctatggtttgttgagattgttttctttgttttctaaggtcttttagtttttgttgtatcatccctctgtgtttattttgcaaatttataaaaaaccaaacgcgaaatttgcagaaaaattgcaatttttatccattcgtcgtgagatatttttcatagttttgaaaatcaatattgataaagcgctttaaaaaaactcatttatatatgtacagatatagatgaaaaactgatcagtagaaccctatgtcagggattgtatgacaaaaaaaattatttaatacaaaaaaaatggacaaatgaaaaatttgaaaaagctttcgagaaatgatttgaaagaaattaatggaggtagattacctggagggggatcatgcagaattagtgttcaatatgcaggtggaggatatggtgtttttgacacccctacaaccggctcttgctctaaccagcagacacaggcaaataaccaatgtcttaatttaattggaaatcctaacagtggaactagatgttcttatgattgtggttgcgatggatatggacattaaaaaatataggaagagtttattactcttccttttacttctattagtatttgtaaattgtcaaaaaaaagacactaaaaatattaataatgttgaaaatgcattacgaatagatacactgaatttaattacaaatgtttcattttatgatacaggaacatttgctctaaatactcttgtaaatcatagaaattttaatttttcaatttctggaactaaaaaaaatgtaaaagaaagtaaagaaataacactaacaaaaccaacagtgtttgaatcctatgctctggttaacggaaaaacaagagttcaaagatatttggtttttagtaaaaataatactttaacatttgaatttcgtaaaaatggatccgtttatacaggaaataagaaaaatgctattctgaataccttaatatcggataatactatttattctattgaagaaccggataattctggtaattacatacagtcgcttaaaaaaaaatatgacaataatttagctataattaagcaagattctactaattataatgattttcaatacaaggcgataaatgattatttagaaatatatttctacaataaactttttaatgtagatttttcaaaaattacaaatcagaaagtaattgaagaactagacaaatactttgatatagttaataacaatattttaatattaaacagacttaatgccgtacaaaataaaagtttaataataaatttattacgatatatatcatttaaaaataaaaatcatcatttgattgataacttacaatttcttgataaaaaattatttaaaacagaggctctagatggttttcttttggattacatggaaaatgataatactttaagtaagaatgatattgatattatgaaaaagtatatccgagaaagcagcctcaaaaaagcaactgagaaaagcaaagggaaagttctgtctaaaaatatactaaactccactattaaagatgcaaaactaaatgaagttgccattaaaaatatattgtcagtaaaaaatgaaaaattaattttagtagacttatgggctacatggtgtgtaccatgtcttaaagaaatgcctaattggaaaatagcacaaaaaaaatatagtgataaaataaaattcattcgtattagtatagataacgatcaaaaaaaatggagcttgttcctaaaaaaagatataaatgatgagtcaaattatattatcagcaactctagtcatccttttataaaatattttgaaatcaactcaattccaaggtttcttttattcaataataagtttgagataatttcagatgactttgacagaccaagtgacaataattttgacactaagattaaagcaattttagatgaaaattaattcgcaaaataaaaaagttaagaggcatctgttgtttcttaactttttaaattgtggtttgtatgattatctatcttttaaattactttatgttttagatttaagagtcaaattaatttacacctccgaaaacaattgaaatttcaagattaacatatattaattaaattggataacgtattgataatttttagatttttcagttaaaaaaagagaaagaattcattttttcaaacattcttcatgcgtagacaaatcaattttataaaatctgttaataaaaaaaagatattaattcatataaaacattcataagcaataaaataactataaatcacgttaaaatgaaaaaagtatttgtttttttcaaacatctgcttattttagatgaaaaatattaatatgctattggacaaactcattaactatctaaaactcgacaaacaggagtttctttttcagttcaactcacacccaaattatccttctgctttagctttcagcgacacattaaatttcatgggcgtacgaaatgatgcgtacgaattagataaagaatactgggatgaacttcctgaagagtttattaccattgtagataattctttttcgctcgttaaaaaaaacggcacacaatattccatttattccgataaagcaaagactttaaataaagaagaactgtacaaaaaatccacagattttgttttgctgtttgaaaaagataaagttgagcaaaaatccgtgacaagctacaaaccttttatttatgctatttttgcggttgttttaatctattcagcaattaatttagcttggtatgaagcggttttcaatgttttatcattggtaggagtgtatatttctttagaacttttcaatcagaaattcggaaatacttctaccgttatcggaagtatctgtggggatacagcaggaaaccaggctgtaaattcctgcagcaaaatcattactcaggataagacaagcattttagggcttaagttctcagatttttctttgatctattttgttggacttaccattttaggattgtttcttcctgcaacttcacttattattaaaggttttaccttagcttcggttattgcaatcggctattctttatatgttcagggatttgttgaaaaaactttttgccgtgtctgccttctgattatttctgttttaacagcccagattttaatcagtgttttgctttttccaattatctcttttgatctgaaaaccgctttacttagtattattttatggattgctgtattctcaatggttttgtatttaaacaatacacttgaagaaagagaaaccctgcaaaaatcgaatgcaaaaaatttaagattcaaaagaaattatgaacttttcaaaagagaactattagaaaaagaaaaagtaacattttccgataatgaaaccttttttataggaaacaaagatgccaaactgcatttatcgattgtttcaaatccatactgcggattttgtaaagatgctcataaaattgtagaaaatttacttactaaatatccaaatgatatttcggtgcagatgagatttaactattctccggataaacagaacgagaaattcacgaatctgatttcagatttcatgtatacctaccgaaataaaccatctcaggagttcttacaacttatagaatattggtttgaaaacaaggatgaaaataaagtaagacaaaaagcaggaacaaattccgctcaggaggatcttactcctcttgtggaaatgtctgccgaaaacagaaatgctggattaaattttaccccaatcattttgatcaacggttatcagtttccggataaatatgatcgtgaagatatttactattttattgatgaattgtctgaagacgaagaaatttaacgggtaattaatttttgtaatgcaaaattcactaatttaggaaaaatttaaagcggaatccgaaaagcttaaaaagagtaggaaatcaaacaaattattatactatgaaaaatctaaagaaaattgcaagagaagatctcagaatgattcagggaggttacggtcctccggtaagtgacggaatgggaggttggtattgcccaaaccgtacagaagtaatgtgtctgaacggatgcacagttctttgcatgagcggaactcagtgtaaaccatctttctgcattgatccaatctttggataaaataacagaaccaaatcattaaattatgaaaaatctaaaaaagcttaaccgaaatcagctaaaaacagttacaggtgggattgcttgcagaaccgaagatgattactgccccggaacttctgtatgctgcagaaacggcggtcagttcgacggattatgcagaagtttacaacaaatggcaacgcaatgcgcattttaaataaataattactatgaaaaatctaaaaaaactttcaagagaaaatttgaaatccgtaaaaggaggtgtaaaagaaggatgtcctggaccaaagtcaccatactatcgtccatatgctacacaagcagaatgtgaggcagctacaggaaaaacctgctcatattcagaagaaagctattgttttcctgccggatggaatgcagatcttctataaaaattaataaattaattttttgaaagaaatagttgtcgtcgaaccggcggcaacttatttataaataaaaacgtcaatcattgaaatcttttcctttctatcgtcaaccagactccaaagactgcggtcctacctgccttcgtattgtaagcaaacattatggcaaaagcatatcactccaacaaatccgtaatctttctgaaacaacaagagaaggaagcagtttactcggattgagtgatgctgcggaagaccttggtttccgctctttaggagttcagattaatttcgaatctttagcggaggaagttccgtttccgtgtattgttcactggaataaaaatcacttcgtagttgtttataaaatagacaaaaacaacagagtttacgtttctgatccgggttatggactgattacttataccagagaagaattcatcaagttatggatcggtgaaaatgccaatgaaaaaacagaagaaggaattgtacttattttagaaaccacccctgctttttttcagacagaatttgatgatcaggaaagtaaagccagtttttcttttctttcaaaatatgtactgaaatataaatcgctggttatccagcttgcagtaggacttttggcaggaagtttactttctctgattttccctttccttacccagagtattgtcgatgtcggtattcagaatcaggatcttaatttcatttatcttgtccttttagcacaagtgatgctttttatgggaagaatgggaattgaaatgatccgaagctggattttgcttcatctttcggcaaggattaatatttctattatttccgatttctttatcaaactcatgaagcttccgatcagttttttcgatacgagaatgaccggagacatcatgcagagaattaatgaccatcacagaatcgagcagcttctcacaagttcttcgctgaataccctgttttcattagtcaatcttattatttttagtattgtactgttgttttatgattacaggctgtttatcgtctatcttatcggagcggcagcttacatcggatggatcagtttttttctgagtaaaagaaaagaactcgattacaaaagattttcacaggtttcccaggaacaaagcaaggtgatcgaactgattaatgggatgcaggaaattaaaatgcataatgccgaaaaacaaaaaagatgggactgggaatttcttcaggttaaactattcaagctgagaataaaatctctgtctttggaacaatggcagtccgtaggaggaaacttcatcaatcagatgaaagatatttttgtgagttttctttctgcaaaactggtgcttgacggaaatcttaccttaggaatgatgctttctgttcagtatatcatcgggcagttaaacagtccattgcttcagttaattgatttcattaaacagtttcaggatgctaaaatttctttggaaagattgggtgagattcatgataaggatgacgaggagaataaggaagagcaatattcccacgaaattccggaaaaagacattctggtggaaaatgtttcattcagatacacaggttccgacgttcccgtgtttgaaaatcttaccctcagcattccctttcagaaaacaacagccattgttggagccagcggaagtggaaaaacaactcttttgaaacttttaatgaaattctacgaaccttctcatggtgaaatccgattgggaaacacaaagcttaacaatatttctccgagattctggagagaccactgcggagtggtgatgcaggaaggctatgtattcaatgataccattgccaataatattgccgtaggtgaagattatgtggataagcaaaaattaagaagatcggtagaaattgccaacattaaagaattcattgaagaattgcctttaagctacaacacaaaaatcggaaatgaaggtttgggagtgagcggcggacaaaaacagagacttttcattgcaagagcggtttataaatctcctgattatattttatttgacgaagcgacttctgcactcgatgcaaacaatgagaaagtgatcatggaaaatctcgaacagttcttcaaaggaaaaacagcagtagtaatcgcccacaggctttccaccgtaaaacatgccgataaaatcattgttttggataaaggaaaagtggtagaaaaaggaaaccatgcagaattggttgctctgagaggagaatattaccgattggtgaagaatcagttagaacttggaaattaagagatacgtaatggcagaaaaagacattttagataatattgagcttcgttctgaaagtgttcaggatattcttacccaccctcctcattggatgatccgttggggaaataccattatatttttgattttagtgcttattttaatcatgagctatatcatcaaatatccggaatttattcctgcacctattattgtaacttcacaaaatccaccggaaaaattagaagccagaaccaattctaaaattgaaaaaatatttatcaaagatcatcaggaagttaaaaaagatcaggtattgatggtcatgcagtcatctgcaaactataaagatgttcttgcattaaaaaaaataatagattctttatctccgaatcaaatatcatcattcccactcagtgaagcctctcatttcaaattgggagaacttcagggagattataacagttttgcaaaagcttttcaggatgaggctttatttaagagattacagccttatgctccggaaaatcttgccgctaatcaaagcctttccgaatatagagtaagaattgctactactaaacagcaaaaaagccttgagcaggcgaaatatgagttgaccaaaaaaaattacatccgttctcaggagttattcaaccaaggagttatttcctccatggagcttgaaaatgaaaagataaaatacatacaggcgcagcaaaatttagaaaacatcaatatttctctttcacagatggaagaaggaatttctaatttaaataaaacaaaaagcggaacagcgataaatacagaaaaagataaaatcacctactcttcccagactctacagctttttgaacaattgagaaaatcgctgaagcaatgggagcaaaattatcttcttatttcgaatacagatggtattgccagtttccagcagtttttcggcgaaaatcaatttataaaagcaggagatgccgttttatctattcttcctaaaaaccgggaaaaactagtcggcagaatgtctgttccggcaacaaattctggtaaaattatttcgggtgaaaaggtattaattaaactcgacaattaccgctatcaggaatatggcatagtggaaggaaaagtacaaaatatttctctttctccagataaagatggaaattactatgtagatgtacttcttccaaaaggactaaagaccagctacaacaaaaacttggttttcgataaagaattaaaaggaagtgcggaaattgttactcaggatttgagattgattgaacgattcttttatcagatgagaaaactactgggatatcagagttaattaaaaaatacagaaccgagacaattatgtttcggttttatatttaatttcaatcaaaaggatagtatcggatgactgccaaaagtttgggagaaagataaaagacataattttgttgtatatctggcgaacaaaaattactaaagcttttacatccaccatatttagtggattattttgatattgtaaaatttgaagaaaatgaaggctcgcttcacctttactttgaagaaaaaatactatcgccgaagagttcttatcccttcagcttcaatcgaaaggattttatcagaatattatagtggacgatgtgctatggggaaagctttaaaactcaatattcaacgcagaagatggacaaatgttaaatacagaaacattgttacttatcgctaaatacacccataacataggattttgaaatcaacaaaagcaagacaaagaaataaaagaactcattctggatatagcaggttcaataaaggttatcgcgaaaaaatcttttccaaatgcgatagatagtgaatagattccatgttcagaagctcttcaggaactaagaattcaatatcggtgggaagccattaatttggaaaatgaaattgtatgacaatccagaggcaggaaagtaaagcctgaaattcagatctttgaaagcgataatacccaaaaaacaggggaaaatcgatggtctaagaaaaatatacactcaaaatatcacgagatccgttaccatgttaaagttggctcattggtttaaggatcttgaaagagtcgggctttaaatcattttctacactaaagaacatcactataacgatattctcaattattttgaagcaagaagcaccaatgctacttgagatcttttaattcgaaaattaaaaacttcagtctactacttcgagggttaaaagacaaagcatctttgttattcagattagctagttgctccttaacaataccttctttataatttatttttaaaaaaagtattaaaaataggatgatgtgtatttgataaaaatagaaaataattttctgtttcaatatttacatcattttcttcatattccaaacggttgcatatagcaatgcattgatttgtgatcccgattctcccaaaaagtaattctgagccagcctaaaattggtttttagatgtccgattataggccctattgctgctcttgttctaatttttttgcgtttaatctgcttttgataagcggtatctaattttcgtggaatgtctgggatagatattttcacacctttgatttgaccacatcagtcgtaaacgagttcttttgcagctcttgaccgctgttttccatttgttccaaaagcggttcaatggtgtgaccatcgtaaggggtttgcaaaaatgttttaataccaagaatgattttttttcctttgtccgaagtggttatcaagcctactttattgcctaactcatactgcttattcacttttcctttcgcaatacattgggtaaatggtttgtaaatgctgtagattctatcgctatcatttcttttttgtgtcactgctttagtgtaaagtgtcattaaatctttgtaaaacactttttgtgcttcattaaaatgacgtccaagttctcgcatcaacctcattacaatggttttgagttgtctttgcgactttattgccgtttttgcccgcttaggatgtttcctgttgtaagtgttgctaatcatttgtttgctgactttagtgcaacgttgtctttgttttatgccttcgtttcggcaattttgttgcaataatcaatcaccttttttcataattttgcatcggtgggaaaagtggcattattcttctgaacggtcgtatctgataaaacaaaattagaggtgatggtctttgcatcgtgcattattacactgtaagcaaatattttttttgatccctttttctccaatcctttttcgaaaatgtacaaatttactggggtcacaagaaaacttgtgctcaaagaaaactcttccactgcatgtaagggttgatcatccaagctgaagcaagtgattgattcatcgcttaaattataaaactgcttcaaaagcaagcaccccatcataaaacgaatcggatggctcggattgcctactttcgaatacaatggcgaaaattctttttcgaaatacttccaatcaattttctctgaaagcaaaaccagttcatgattattatcaataaaatccaccaacatcggacggaatagttctggcagtttctctggattttttagctacgctggaaccacttcgttaggtttcccaacatatttgcaaggttttaaaaacttaaaatacaaaatcttgcaaataaaaacaaatgaaatagactttagtttattaataaacaggtattgttaaattaaaatatatttaataaattagtattatgaaatgttataaatgtcaatcattagataaagtaaaagcgggttttacaagaggtttgcaaaggtataaatgcaaaaactgtggnnnnnnnnnnnnnnnnnnnnnnnnnnnnnnnnnnnnnnnnnnnnnnnnnnnnnnnnnnnnnnnnnnnnnnnnnnnnnnnnnnnnnnnnnnnnnnnnnnnngctgctgtattaacatctgctttactcttaaatgcagtgttaatatacaaagaaggagcgtaaaactatacgttttacactccttttttattggttaataaaaatttagtttttcagtgacctcctaaatcttagctgcttttttaatattaataaccaaaaatctcagtcaaattcaatttcttcacttcaccgagtttctgcatatcggcttcacttactttatcctgcgaagcaacgagacagtaggtgtagcttttacctttcatttccttgtcgtggaaactgttgatgtctgcaaacgtcagttttggagcctgttcgtaagtattctttcggatatccgtattatttccaagcttttgggctcttagatacgtaaagataattccgtcctgcgtaattctttcggaggcaatcgttttcttcaatccgctttttgccgtttcaaataactgatcagatttcggaagcgttgtcagaagctcattcatggctgtggtagattcattgaatttatctgcctgagttcctacataagccatgatcatatctttatcctcttttttgcccggaagagagaagtaagaataggtagaataagccaaagctttagattccctgatcgtctggaaaactacagaacccattccgccgccgaaataattattgaacaaattcacggtcggagtaatgcttacattataaggatcgctgtttcttacccagaaaatttctgcctgtaccatatcgtaatgggcaaacaatactttattcttatccgtaggaatctgggtaaatgttttagacttcggcatatctttcagcgaagccggaactttatgaatcagcgttaaagaagaagcaacttcgttggctgatttcggaccataatgaagaattttatgcttaaaattaaataaatcatgcaatacattcactaaatcttctgcttttaaggcatctaattctgcgtcgctcaatacgttattgaatggattttgaggaccatactgtgcatagcttctcaatccgctcatgatagagcctttattctgtttcgcattggctcttgattttttcagcctcactttgtaggaatccaacgctttctgatctgccacacagtttttaattaaatcttcgaacagagccgcagttttatcaaaattttcattcagaccttccagtgtaacgtaggtttcttcatttcctgcgcttacattgaaacttgaagccagtttgtaaaattctttactgatgtcttccgaagatttattttttgttcctaaatattgcagatattctgctgctaaaggaagaattttattattccattttccggcatcgaaataataatataatctgaaaagatcattgtctgtattttttacagaaagtacatccaccgattttactttgcttttggcaatatctttttcaaaattcagccatactggagaaatcggagcttccggcatttcgtcgatctttttcaggaacggcgactggtcttctctgtttacggaaaccggagtaatggtaggtttgtctacttttacgatgtttttgtcttctccctttcttttgtaaaccgctacataattgttgtctttaagatatttagatgcgaaatccataatatcttttttcgtcagtttagaaatttcttcaatatactgaagctgggttttatggtctacttcggaagtgaattcatccatcagagattccgctctcgaagtgtatttttcatacttctggatcacatttttcttctcattattcacgatcgactggatcaggtcatcagaaaactcgccttttcttagcttgtcgatttcctgaagcaataaattcttcacatcatccaaagattgtccttccgtaggatttccctgtaacaaaagcgccgaataatctttcagaacatacggaaacgcataagcacccagtaatttctgctttttaaccaaatcaagatcaattaatcccgcctgtccgttggtaagcatacttccgatgaaattcagcattcttgcatcttttgtagtagcacccggaaaacggaatccgatcataatattttcaggattcggtccgtaaacttcccgggtaatcggagccataatcggactttcctgtcccggattgtaagccggaaccgatttgtttttcatataagaaaaagctttgtcgatcttgccaatcatttcatcaggattaaaatctcccgacatgatgatccccatattattcggaacgtaataattgttatagtattctctgattgcttttagtgaaggatttttcaggtgttcaatcgttccgatggtcgtttgctttccgtaattgttattcgggaacattgcggcaaacatagattccagaacctttcttccgtcattatcaagccctctgtttttttcttcataaaccgcttccaattccgtatggaaaagtcttaaaatcggctgtctgaaacgttctgcctgtaatgctaaaaatttatccgttacatttgcaggaatgtcttctgtgtaaactgtctgttcgtacgaagtaaatgcgttggttccgtctgcgcccattcccgacatcattttgtcgtattcgttcgcaatagcatatttcgctgcttctcccgaaactttatcgatttctttataaatttcctttctctttgcttcgtccgttgtagaattatatttttcgtaaagagcatcaatctggtcaagaagcggcttttcttttgcccagtctttagatccgaattgatccgtccctttaaaaagcatatgttccagataatgcgccaaaccggtatgatctgccggatccgttttgcttcctgctttcgttgcaataaaagtctggattcttgggtctttcttcgttgggctcagaataacggttaatccgtttttcagcgtgtaatatcttgctgaggtagggtcgttggttacatatttataggtgtagccattcgactgtgcttctttccactggaaatcctgtccgtaagcgtatccgcagtaacttgctgctgcaatactggttacaatggtgattctctttaaaaaattcatgttaattgatgttggaatatgtttgattattaaaattgtttaaactatttcaggattaatcacaaaagtcgcaaaagctaatattaaagtgagtttctataataattagagtgctcaaaagaataaaaatcaaagatttttaaaactattgttacctttttcatgtataatgatcaactttaaataaaagtttagctcatcttttgtggcttttgtggttaaataaaagtttaaacagacttattatttaaaaaatacttaaatcactcttagttaaatttatcaagtaaatctttaattcttctcatggcttcttttaaatctttctccgaagccgcataagaaaatctgatgcattcagggcttccgaaagaaactccgccaacacatcctacatgagcattttcgagaaggaacatcgcgaaatcatcagaatctttaatttctgttccgtctaatgtttttccgatgtaatgcgatacatccgggaagaaataaaaggcagctttaggcaaaactactttaaaaccggggatttctttaattaaatcataaaccagatctcttctttttttgaaagcatcaatcatatatttatactccgaaggatcggtctgtaaagcggtgatagacgctctctgagccattgtgttcgctccgctcgtcatttgtccctgaattttttcgcacgctttagccagccattccggacacgcagaatatccgattctccatcctgtcatcgcaaacgctttagacatcccgttaataacggcagtctgttcgtaaacttcaggaaactgagcaatcgacgttgttttcgtttcgtagttgatgaattcgtagatttcgtctgaaattaccgttacatgaggatatttggcaatcacttttgccagagatttcagttcatcatacgtgtaatatccgcctgaagggttgcacggtgagctgaacaggacagccttcgttttatctgtaatggcttcttcaagctgttctgcagtgattttaaaatctgtaacatacgaagtcggaagcatcacagaaactccgcccatcatttttaccatttcatcatagcttacccagtacggattcggaagaatcacttcatctccatcgttaagaagagcagccagaacatttaaaatcgcctgttttgcaccgttggaaacgcagatctgcgttggtttatattctaaattattatctcgttttaatttgtgagcaatcgcttcacgaagttctaaaaatccgggaacaggagagtagtgactataattttggttaatggcatcgaaagcagcctgtttgatattgtccggaacatcgaaatcgggttcccctaaagtaaggcttataacatctattccgctggctttcatttctctagccttattcgacataacaaaagtttgtgagtaaccaagtctctgtactctatctgaaagtttctccatgtaattatttctattttaacaaatataataaaaagtatttcttcagaagttaaaatacagccggagtaagctttttttgtctgcgtcagcgttttatcactatatttgtagttattcaatataaaattaaaacaccagtcatcattatgtacaaatttctgtttctttttatcgtttcactggcttcggctcagaattaccgctttgtgtacgaatacaggatgaggccggatctcaataaaaaagattccattattacagattatatgaatctggatacggacggtaagaaatcctatttttataacgcggcgaaatacgaaagagattctgcttatgcggctacaaaaagttataaggatttgctttcgtctaaaaactatgaccagaatctcagctatatcattgaaaaaaattatgctaaaaaaacaattaacttttatgataagtttaagactgtcaatctgttaattccggataatgaaattccgaaatggaaaattgaaaaagaatttttaaaaattaataatatagattgccagaaagctacggcaaatttcaaagggaggaactgggaagcgtggttcagcaaagattatccggttaatgacggaccgtacagattttcaggacttcccggactggtggtaagccttaaagattctgaaaatgatcacgtttttaatttaattcagattaaaaaaatcaacggaattttttcgcttgtcccaaaatctacaaagcagatgacttttgcagagtataaaaaagcgatgggaggttttagtttcagcaacgacgatgtggaaagtataagcatcaataaacagatagggaaagttgatatccaattgaaagacggttacatagcaaagctcggaactgatgatatgaaatccggaaaactggatgagaaaatttctaaattactgaaaagaaccaacaattatattgaaaaagaggagtaaagaaatttctgaaaggtaaatcttggtttttataatttgaataaagctgataaaaaacttatttttgctttttataataatttacatgtctacaacgttactactaaaatactttccggatcttacagaaaatcagatcgatcagttcaataaactggaggttttatatcatgaatggaatgaaaaaatcaatgtgatctcaagaaaagatatggaatctctgtacgaaaagcatattttacattctttgggaattgcaaaagtgatggaatttgctcccggaacaaaagttttggacattggaacaggcggtggttttcccggaattcctcttgcaattttgtttcccgaaacgcattttaccctgattgattctatcggaaagaaaataacggtggtaaatgctgttgcagaaggagccggattaaaaaatgtaaccgcaatccacggaagagcggaaaaattaaaggaaaaatttcattttgtagtaagccgtgccgtaacacagatgcctgaatttttaagatggctgaaaggtaaattcgagaaagaacaatttaatacaaagcataatggtgttctgtatctgaaaggaggggatcttgctgaagaattagccggactgaaatgtgaaattttcagcctgaaaagttattttgacgaagaattttacgatacaaaaaaagtagtgtatctttctaaaggtaattttaattcttaattttgtatttaatgtttaaactaatttgagaattaactgcaaaagtcacaaaagatcagcacaatgcgacattaaaatatttaaagctcccaaaagaataaaaatcaaagatttttaaaaactattgtgatcttttttattataattattaattttaaataaaacgtttaatgaatgtccgtaatttattatcattgaaaaaccttttgagttctttgctgagtgaatagtttatgctgagtttatcgaagtacctttgcgaacttaaaagcagttggtatataaaagaatcttagcgattctttgcgttaaaaagcaatatgattaatataacggataatcaaaaagtttaaacacattttgttaaataataaattctgatatttttaataataatctaaattttgtaactatgaaaaagtttctccattttgggttttctgcattagttttaggattattttttacatcttgtaacgatgatgatgactataacaccatagaatctgttgataaaattaaaattgacagtgtgagaattgttaatgatacaatggatgttttttcggttcagagtattaagacttattctacttatccgtctcattgtcagggtttttatggatatgattatgtgcataatgataatttaaccagaaccgttacggcttataaatacattacaaacggaccgtgtacggaaaaagcgtatacttccgccaatcagatcaatttcagtccgcaacagattggtacatatacttttaaattctggaatggtggcaacaactggatcaccaaaacaatagtagttcaataaaaataaatgaaaggagtttttgtggcttgttttctgatttccaatattctattcggtcagaaaataaagtgggaagagggaaaaaaattgaattggagcaattttaaaagcaaagtcaataaccagcgtggagacaatgtcgtggcttatacgaactgtggatggacgtattcctacgtaaaatcttcaaacccgaaagctccggtaaaaattacgattcagacaatttttaacgaaaaccaatcatggaaagacgttaaaagaatcaatgattatgtgctgcttcatgagcagaaacattttgatgttgccgaagtttttgcccgcaaactaagaaaagaagtggcggaaaagattaaaaacggagctgatttcgacaggtattttaaaaccatttacaatacaatcctcaaagaatatcaggatttccagaaaacttatgacggcgaaacaaggaacggaatggtagaggaaaagcaggcggaatacaaccatattattgctgaacaactggaaaattacaaaaactataaaacctcttgaaattcctcaataaaatcatcagtgaattattaacccagaattctgatttatctgaatttaacatcgttctgcccggaaaacgtcccattgttttcatcagacgaattcttgaggaaaataactactccggatttctgccgaatttttttacgattgaggaactgattgacaaaattgccgacaaacagcagattcagggaattgcactctggcttttcgcttttgatgtgtataaaagcctgaacctgattcccaatgacgattttgcagaatttctgaaatggtttcccacgttgcagaaagactgggacgacatcctgaaattctccgaaagtgatgaagccgttttacagtatatgtttgatgaagagcggattaaagaatgggcacaggatttgggagaagatgatgatggtccgcgaaaaaaattccttaatttctggaaaaacatgaatgtttttcttccggttctcaagaaaaagctgaaggaaagaaactgggcaacttccggaatgatcaacgaagcggcaaaagcaaagattgatgagtttgccaaaaataccagtgaaaaattcgtgttctgcggcttcaacgcctttactccggcggaagaaaagcttgtaagaagtcttctgcaatgggacaaaggacagtgcttttttcaggcagatcattattattttgatgatgaaagacaggaagcaggaaagtttttaagaaaccataaaacgtggaaggaatttgatgatcaccgtctttttcaatggattgaagacgactttaatcagcccaaaaatataaaagtttacgaagtttcaggaaatattacccagacgaaaattttaccggaaatatttaaagaaatagaaaataagacatactccgatactgcggtggttttgctggatgaaaacctgcttcctgcaagtcttgatgtgatgcacggcgttcccaatctgaatataacaatgggttttcctctgaaaaatctttctttttcgaatgccgtaaaacagcttttttatcttcagaaacaactggaaaaaaacaaatcgtcgtactattaccgcgatattttcccgattctggaagagttgccgaaatctgctgaagatgaattggtgatcaataattttaaagcgaaaatcgaagaacgcaatatcgtttacatttccaaaaagctttttcacgaattgttacatgaactttcgtactataatttactgaaaaaagcagactctacaactgtttatttagattctttaattgaattctgcaagcggatcaaatggctggaaattgatgatattcagtatgaaaacgtttctcatttcgaaaatgctttcagaattatcaaaaaccagttgtctccttatcagtttgaaattaaaatggaaacgctggaaattctgattaatcagcatattaattcagaaagtattgattttcagggggagcctttgagggggttgcaaatcatgggacttctggaaacacgtcttctgaattttgaaaacgtgattatgctttctgtgaacgaagggaaattaccgctcggaaattcacagaatacgtatattccttttgatatcagaagattttttgatcttcatacttttttggaaaacgacagtatttatgcctatcatttttacagattgattcaggattccaaaaatgtacatttattgtttaatgccctaagttcgggagtgaatacaggagaaaaaagccgtttcatcacccagatcgaaatggaaagttctcacaatatcgaacatctgattattgaaaattcttctgagccgattattacacagccgattgaaatttcaaaaaccgaaattgttcttcagcgactggaaaaatggaaggaaaaagtttcggcttctcaccttacaagttatctgtacaatccgattgatttttacctttccaagattttaaagacctcggaaagtgatgaaattgaagaagaactgtctgtaaaaaactatggtaatctggtgcattatacccttcaagaaatttatgaagtattaaaaggtaaaatattaaaagaaaacgacttaaaggaatcagttaaagcaatagatcaatatatagaagtggctattgaaaagctgaaacatcagccggaattttatgaaaaaggaatgaatttcattcataaagccattgctaaaaaagtcattgaaaatattttaaatcatgatttggaactggtaaaaagcggaaacgtactggaaattttagacattgaaaaacgttttgaaaatgtagatttttatcttgatgaaaaagacaaagtttcttttttcggcttcatcgacaggatcgaccggcttaacggaacgttgagaattattgattataaaacggcaaaaattaaaaatcttatcgtaaaaatcgacgaatccaatgtagacgaatatttccataacagcgaccgaaaacaggctttgcagttgtgcatttatcagtacgttgtacagaatcttcccgagttttgggggcttccgattgagacgggaatctggagttttgcggaagctaaaaaaggcgttttttctcttcagtttgacaaaggggatattgatgatgccatgaaatccattaaaagcctgatcgaagaaattctgaatccggatcttgcatttatcgaaaacataaaaccttattctgtataaaaagaatgcatccgaaacgaatgcactcatgacgatgaaggattgtatgaagaaaattactataatttcacttttttattgaaagtttttccgtcgttctgaattacctgaaccacgtaaattcctgttttgatggtatttgattcgaattgagagctgtttacttcctgattctggattaaatctcctgaaatgctgtaaatactgatatttttaataccgtttttagcttttacaataatctgattattttgagcaataactgaaacaggatcttccgttttcagttcactgatttgttttttaaactgtaaattatagaaacgggtagtaatttcaaaagtaagattttgagaatcaatagtattgagattgatcccgccatctttaatatactgttcctgagaaaccgacttgataagattttgattgtcatcaaaaatattgactgctaaaagttcttcctgattgatttttaaattcagaatattgttaagctcagattttacaatatccttttcttctaccgtttccggactgtttttaatgtacggaatgagtttttccgaattattttcagagacttttaataaatatactccatcttgtaaggaggctaaattgttgttgctcacagcttttcgttcagctttttctttgttaaaatctgtgatttcaagaagttccacattctgaagatctggttttatctgggaagtataaagagcgctgattgcgggctgactgttttgcgcttgttttgaagtcagcattgcccattcgttaaaaagtccgccgcttcttaatgtgttgaatttggcattggatgccagaacaaaaggcacaattcctccgatatgtcctaaaggtccccaataaagtgcctccagtttgtatttattcagatcccaccaggaataataacctctctgaacctcaatggttttagaagtattgtccggatgaatggcgagatcaaccgtagaatgtcctaaagtcatgggtgttttgttataccagtcgtacacgtcatttgatttcaggcattgtctcaatttgttattctgattattcgtaacatcatttacgaaattattggtaaaaagtgttctccaaaccaaaggtccccaaagcagacctccattatcctgaacaacatgataattgtagcgatccagatattctgaagagattacttctgaaatactgctgttgtacatttggtaccctgttttattgcaggtattaacaacattggcgatgaaagaagtaaacggataaacctgtttttccagaacgcctttctgtaaagtaacgcctgagaaatcataaggtccgtctcccatatacgcatacttaaaagacagattgttaggattcgaaatacttaatttctttaaggtagacattgctgcatgagcgccctgcgaataacctgttaaaaaatactcgtcgtagcgtttcacattttgctgggcaagaactttattggctgccgttacaaaatcaatggtcgcagaagcttcggtaggatagtgtacatacggatgaactccgtctccgcttcccatccctacataatcgggagccattaaaatatagccgttcaggacataagaaagctccactacaaatcctgcatacagaactcctttaagattggaaggtacattttggcggctgtcggtggttccgtgatccgaaactaccgtagaaagcttgtagttcgcttttggatacatcagaagtccggttgcctttacgagattatttttctcgttttttgtataatatgttattttataggcttttaatcctacattaaaactgttgagataatttataaaatcaggagaattctgttcgccaagattgtttgagataaaacccgccaccgcttgcggagtaagatcaagttttggttcaacactgaaaacgtctccggcttgttgtgcaaaataaaaggaagcagtaagccccaggaaaagagtaattgattttttcattattgtcaatttttattgatgtttaagttaaaattttaaaataaaacagcggtaattttatcatatcaataattattcagtgaatatcaattttttttaaaagaaaaagtctgaccaaaaactggtcagactctgtattattttattacaaaatttgctctcttagaaggcgttaattcccgtaatatcaagacctgtaatcaataaatgaacatcatgcgttccttcataagtaatcacagattctaggtttgcggcgtggcgcatcatcgggaattcacccataattcccattcctccaagaatctgacgggattctcttgcaatatcaatcgccattttcacgttgtttcttttagccatggaaatctgggcaggagttgctttatgatcgtttttaagatttcctaactgaagacaaagtaactgagctttagtgatttccgttaaaaattcagctaatttcttctgttgcaactggtaagatccgataggttttccaaactgttttctttctttagaatactgaacagcagtgcagtagcaatcaatagccgctccgataaccccccatgaaataccatatctcgctgaatttagacaagataaaggtccttttagtcctgtaactccaggaagaagattttctttcggaacttttacatcattaaagaccaattctcctgtttttgaagctcttaagctccatttattgtgagtttcgggcgttgtaaaaccttccattcctctttcaacaatcaatccctgaacttttccttcttcatttttcgcccagactacggcaatatcgcaaagaggagagttggtgatccacattttagccccattcagaagataatgatctcccatgtctttaaaatgtgtttccatggaacccggatcggaaccatgattaggctccgttaaaccgaaagaaccgatcatttctccggcagctaatttgggtaaatattttcttttctgttcttccgaaccgaattcattaatagggaacatcaccagagaactctgcacagaggcagcagaacgtactgcagaatcacctctttcaagctcctgcataatcagaccgtaagaaatctgatccagtccggaaccgccgtattcaaccggaatatagggtcctaaagctccgatttgtcccaattccttcattaaattcgggatgtcggtgtggttttgggcagcatgatcaatctgcggcattacaaaactttccacccagtctcttacagactgtcggataagtttatgttcttcagtaagtaaagcatcgatcccataataatcgggaatgctcgtaagggaataatatgacattatattttaattttcctaaaaataagacttttcactatttcagagaaattttttttaaatgacttttatctgttgatttttagatatttaaactgaattttaaatacaaaacatcaaaatttaattttcctcttcgttggaaatagggtactgatttgtcggattgtagatcctggttttaaacttgtacaaatacggagctttattggcagaaccgtcatacagtttttccagtcggtctaaaatattaagacttaaaattttacgctgaaaattgttccttctgaatttttcacccaaaatcgtttcatacagacattgcagatctttcatggtgaatttttcaggaagaagattacttgccgctacttcggtattgatgttcattctgagatattccagtccggtttctatgattctgtcgtggtcaaatgccattttgggcagtttatccacctcaaaccattcgcagctttcattaaaagcatccggaaaggtatttgccatcgaaaaatcaatcaggctgcagtatcctactgtaataaaacgctggaagatccagtgatctttaggcacttcaacgcctttgtttttaagcaaaatctggtgaacattattttctgtcctgtcgattcttccaaaagtatgaaactgtttcaggaaaatattctgaagatgtgttctttcgtataaaacacgttccgccgcttcacgaagatcttcatcattaaaaacaaaaccaccgggaagagaccacaaatcgaggtcatggtattttaagagtaaaactttcaggatattgttatgaaaaccaaatatcgtgcagtctacagatacgtgtgctacaaaatcttttgtatcaataagttcctgaagtgtttccttgcttttttcgttcttgattttcatgggagtaaaaataaaattattttctaaatttttttatctgcaaatctaaaataaattaaactaattgtaaacaacagaataacagcagataaaatatacacagaatagtaattcagaagctgatttccgaataaaaccgacatgatgatcgaacttacagagcttcccaatgatgaaaaaataacaatcagcgaggtgaaaacattggctttcgacttatcgattgtggcaatcatcttagaattgatgaccggataaagcggagataaaaacaatccgataactgggaagagaaacagcaggatcttagaatcgtccattcctgaaaattgtattccgataatgattaaaagcactataacaatggatgataagcacagaatataatatttcggcaaagaaaatctctggataacattagccgtaactgttcttccaatataagaaaacagggctaaaaacgaagatgcctgaagcgcaaaaaaagaatttacctttaaatgattcttgtaaaaagacggcagccacgaattaaagctttgctctataaaaacaatcgaaaaaactacccctaaaaatataataattaaaggattggcaattcccgcaacttccttaaaaacattttcattcttcgttttttcaggctccgaaacaggaagttttgaaaataaaaaaatggtaattgccgataatacagagatggataaaaatccgaatttccagaattctgaaaactgactggaaataacccatccaaatccgatattcacaacaaatattccgatcataaatgaagcttctacactattcatggttttggctaaagatttttcatccgaaatattgtttctgatgattccgaaaacgcagattttcccgatcgcgaaacacgctccgatgatggcaaaccatactttataaaaccagaatacttctacgaaaggtaaaataagagagcatatcccaacaattgttaaagccagaatcagggatttttttgttccggttttgctgataaaattaacagcaaaaagtgaaataaaagcaatgggaagatctttaaaagactctaaaaaaccaagcttatcataggtgattttggcttccgaaagttgaagaattacaatgcccatgcagtttagcaccatggagaaaattagaaatgtaagcttgagcggaagtgaaattttggagtgcttggtcgtcattttggggattgtttttatctgtttttttgaaatttttactgtttctgaagaaaaatttatgccttcaaatgcccaaaaatactggaaatattaaaatagttattaataaaatgttaaataattaaaaaaaaatatatttttattgtctcaatttgagaattaaaaaactaactgtatatgaatgtaagaatatctagaagtttaggcatggttgcggtgctttatttcactgcaaattttaatgcccaaaacacaaagaccgacacccttccaaaagaacagaaaattgaggaagtagtcatgattggttatggtactcagaagaagagtaatgtgacgggagccatctcgagtatcaaagcaagtgacatcgaagcgatccctgccggaaaaccggagcaggttcttcagggtagagccgcaggtgttaacgtaatttccaactccggtcaaccgggatccagtgcaacaattcgtgtaagaggggttaccagttattcctctaataatgatccgctttgggttgttgacgggattgtggtagacggaattggatggttaagccaaagcgatattgaaagtattgaagtattgaaagatggtgcttcttctgctatttatggagtttctgctgcaagaggagttattttggtgactactaaaaagggaaaaaaaggaaaacttaccttatcttacaacggtttctacggggtgagcaatgctgcaagaaaacttgatcttcttgatgctacacaatatgctactgtcatcaatgaaggttttgccaatgacggacaagctgtaagatttcaaaatcctgcatcattcggaaaaggaaccgattggcagaatgaaattttcggaaccggagcaagacagaaccacgaggtaagtatacagggtggaaacgaaaaatctacttactttgcgtcatttggatattatgatcagacgggtatcgtaatgagcgatatttcttattacaaaagattaacaggacgtttaaattcaactcataaagtaacagactggcttactttggggcaaacttttgcctataccaaccaaaaaaaccaagggattaatgctaatggtgagtttggaggtcctctaagttctgcagtgaatttggaccccatcactcctgttgtggtaacagattggtcacaggtaaatcctgctttatataccaatgaacatattttgagagatgaaaatggaaatccatacggaatttcgccttatgtaaatcaggaaatgtctaatccaagagctttcagatatacacaattaggaaacaataactggtcagacgattttattgcaaatgtatttgcagaagtaaaatttttaaatcattttacatttaaatcttcattaaacggtaaaaaagcatattggggaagccagaatttcactccacttttctatttaagtgcaacatacagcaatttagttctaaacagcttaagccgtacgactcaaaagaaatttgaatggagttttgaaaatacattgaattaccagaataaatttggagatcatagcctgaatgtacttttgggaacaggatattatgactataatattggaaatggacaaaccgttactcataaggggcttccgatcagcagttatgaagaagcttccttcaactttgaagttcctttggcaaaccaaacttcttcagcatgggataatcaggaatggaacaaagcttcttatttcggacgtttaatttatgattttaaaaataaatacttatttactggtacattaagatatgatggttcttcgttgtttggggcaaatcatcattggggtgtattcccttcattctctttaggatggaatgtggataaagaaaacttctggccggaaaataatgtggtaaatagtttaaaattccgtggaggctacggaactttagggaatgatggtattgaagtttacaaattttcaaaactttatattcctggagcaaactataccagtggatcaggaggcgtattgattggatatttgcaaaatggtcttgaaaataaagatttgaaatgggaaacgaccacacaaacaaatattgcagcagatttacgacttttcaaaaactttactttaacagttgatgtttataacaagaaaacgtcagatattcttagaccggttcaaattccgggatatgtaggagttacaggatcttacgttgccaatattggagacatgagcaataagggggttgaagtagaattaggctacaagaaaaactggaacgatttcacggtttctgtaaatactaatttcgcttacaataaaaacgaagttttatcgctagaacagggaacaaaatttttggatggagcaggtttccaatctatgggatcgatccaaagaattgtagtaggtgatgcctataattctttctacggctttaaaactttgggtgttttccaaaatcaggcgcagattgatgcgtatgtaaattctaaaggacaattgcttcaaacagaggcaaaacccggagattttatttgggcagattctaacggcgatggggtaatcaatgatttggacaaagtgaatttgggaagttcaattcctaaatataattatggagctactttaaatgtaagctataaaaactgggattttatggtattcggacaaggtgcgggaggaaacaaaatctttcagggtttaagaagactggatatgctagatgctaattatcaaaccaaaatcttagacagatggacgggagaaggctctactaacgaaaatccgagactaacacgagcggacgcaaataaaaactactcaagactatctgactggtatttgcaaaaaggagattatttcagaattaaattaattcagttaggctacacgctgcctcagaatgttacccaaaactttggagttaacaagctaagattttatgtaactgctgaaaacctagttacttttacaaaatataccggatacgatccggaaattgcggcaggagattcttttggaatagacagagcattttatccgcaggcaagaactttcatattgggagctaatataactttctaatttttagtacaatgaaaaacaaatttttaaaaatatcaatagcagcttcatttttagtgagtgtatctactcttaatgtagcctgtaacaacgacactttagaagaaaaggaatacaaaggtgcattttccggagataattttttcagaaatgagcaggaatgtttttttggtcttgtggggacgtacgacgtaatgagaaaatatgcaggcggatttgaaaatatggtcacttttttcaatgcagcttcagatgatttctatgcaggaggtggtagtgctacagacggagccggtattcagggagcatcaagttttcagattaacccaactacaatgcctgcaagttattggagagattattaccaaggtattgcaagagctaatgcccttattttaaatgctcccaatgcatcaatggatgaaactttgaaacaacgtttcatttcggaagcaaaaactcttcgggcaatgtattactttgatttgttgagggttttcggaaacattccccttattttaaaaccttttgaagcaacagacgatttttataatgttccgcaagttgcacctgcacaagtttatgctcaaatagaaaaagatctgactgaagctttgccaaatcttcctatgacggtaattggagagcaaaaaggtagattaacgcaaggtgcggcaaaagctcttttaggtaaagtgtatctatatcaaaataaaaaagctcaggctgccgcacaatttgcagatgtaaacggaactccgggcggaaccagtcaatatggatataaactgttggcaagttatgatgatctttggaaagcaggagtagcacttggtggtactccagatccttatgagtttacgtcagaatctattattgaagcatcccatagcgaccagggaaaatccgattggggcttttggggacaaggcaaggatgaaggaaattctatctgcgttatgagtgcaccaagatcttataacagaattagtcagacaaatcctgctaataatgctccggatatcgtctcaggttgggcatttaatacagttacaacagatctgtttaattttatgcagagtgatccgcgtgtaaatgctactattctaaatatgaatgcgttaaaagcgcaaggtaaggcagattatgcaccggcttataaagatacaggatattttcttaataaatttatgcctacatctgataaaaaatcaactttaggtgttaccgaactgaattatcgtcaaaattatatggtgataagattagcagatacctatctaatggaagcagaggcacttaacggtacaggttcaagagcacaagctttgttggatgcggtaagagcaagagttggtttagcttcagttcctgtttctatgcaggcaattaaagacgaaagaagaagagaacttgcaggtgaaggacatcggttttttgatcttgtaagatggggagaagcatcttccaaattggcatttaaaggatttacagcaggtaaaaacgaaattctgccaattccttttactgagttaacgggaactgttcttaaacaaaatcctggatattaaaagacctagtgtcgacaaagttgaattccgtagaactcaataatcttcacacaattaaattgatatgaaattacaatattcatatagtttcgtacttagaagtgctgcactttgcggtgtagcgcttctttctttttttaactgcagcagtacctcttcggatttatccaataatacagataattccggaaacaacggaaacggaagcggaaacacttccggagatccggtacaggtgtggttaacgaaaggagatcagacagtgaaactacaacagcagggaacctcttatttttcaggaacttcagcagcaggaaccaccattgaagtagacggctcgcaaatattccagacgatagatggattcggatatacgcttacaggaggaagtgtacaggtaatcaatcaactgagtgcgacaaaaaaacaggaattgttaaatgatctgttcagtgcttctgggattggggtaagttatttgagaatcagcattggggcttcggatctcaacagcgaaattttttcgtatgacgatatgccgaccggacagactgatccaacattggctcaattcagcttaaccaaagatcaggctttgatccagatgctgaaagatattctgatcattaatccgaatattaaaattttagcaacgccatggtcgccacccgtttggatgaaaaacaacggaaatacgatgggaggaagtctgaaaccagaatattatggggtttatgctcagtatttcgtaaaatacattcaggcaatgcaggctcagggaatcagaattgatgccatcaccccacaaaacgaacctttacatccgggaaacaacccaagtatgtatatgtcggcaggagatcaggcaacttttatcaaaaataatttaggtcccgcttttcagacggcaaatattaatacaaagatcatagcttatgatcacaattgcgacaatccggcgtatcctttagctgttttaaatgatacagcggcaaatccttatgtagacggatccgcgttccatttgtatgcaggagatatttcggctttgggaacagtacataatctattcccgaataaaaacgtctattttactgaacagtggacaagttctaccggtgctttttcaggagatctggactggcacatgaaaaatgttatcatcggatccatgagaaactggagcagaaatgctttggagtggaatgtagccaatgatgcttcattcgggcctcatacaccgggaggatgtacccaatgcaaaggggcaattaccgtaaacggaagtacgggttacgacaaaaatgttgcctattatattattgctcacgcttcaaaatttgttccggcaaactcccagagaattgcttctacacagtcagataacctttccacggtagcttttaaaactccggcaggaaaaacagttttaattgttcagaacagcaactctacagataaagcattcaacataaaatataatcagaaaacagcttcggtaactatgccaggaatttctacagcgacttatattttttaagataaatatatctgttaaaatttgtaatgattgaaaactttttgttctttgttaaataaattcatcctgaacttcaggttaagaaaaatagtacaaaaggacagataattaaaattagattaaaatgaagagagtttatttcttattggcagttacagcatttggaatcaatacattcgcacaaaagacaattgatcagaaagtttcagaacttttgtcgaaaatgacgttagaagaaaaagtgggacagctcgttcagtattcaggatttgaatacgcaacaggtccgcaaaattccaattctgcaagtgttctaaatgaaataaaacagggaaaagtaggctcaatgctcaatgtggcaggagcagaagaaaccagaaaatttcaggaattagctttaaaatcgagattgagaattcctttattattcggacaggatgtcattcacggataccgaacaacctttcctgtaaatttaggtcaggcagcgagctgggatttaaaactaattgaaaaatccgaaagaattgccgcaacagaagcttcagcttacggaattcactggacatttgcaccgatggtcgatattgcaagagatccgagatgggggagagtaatggaaggttctggagaagatacctatcttggaacacagatcggtcttgccagaatcagaggttttcagggaaaaggtcttggaaatcttgatgccatcatggcttgtgcaaaacattttgcagcctatggagcagcagtgggcggaagagactacaattctgttgatatgagtttaagacaattgaacgaaacctatcttcctccttttaaagcagcggctgaagccggagtagccactttcatgaactcttttaatgacatcaacggaattccggcaacggcaaacaaatacattttaagagatttattaaaaggaaaatggaattataaaggttttgtggtttcagactggggaagtattggagaaatggttcctcacggttacgcaaaagacaataaagaggcggcggaaaaagcaattattgcaggaagcgacatggatatggaaagccgtgcttatatggcagaacttcccaatctggttaaagaaggaaaagtagatccgaagctgattgatgatgccgcaaaaagaattttggttaaaaaattcgagatgggattgtttgacgatccttaccggttcagcagtgaaaaaagacagcaggaacagaccaacaatcaggaaaacagaaaattcggaagagaatttggatcaaaaagcattgttttgcttaaaaatgagaaaaatattctgcctctttccagatctgtaaaaacggttgctttaattggtcctttcggaaaagaaacttctgccaaccacggattttggtcgattgcttttaaagatgacaaccagagaattgtaacgcagtttgacggaattaaaaatcaattggataaaaattcaacattactttatgcaaaaggagcaaatgttgacgatcaggatagatccatgtttgctgaagcggtggaaacagcaaaaaaagcagatgttgtgatcatgactttaggagaaggtcatgcgatgagcggtgaagcaaaaagcagaagcaacatccatttttcaggtgttcaggaagatcttctgaaagaaattgctaaaacaggaaaaccgattgttttgatgatcaacgcgggaagacctttggttttcgattgggctgcagacaacattccggcaatcatgtatacttggtggctgggaacggaagcaggaaactctattgccgatgttcttttcggaacagtaaatccgggcggaaaacttccgatgactttcccgagaacagaaggtcagattcctgtttactacaatcattacaatacaggaagaccggcaaaaaacaataccgatagaaattacgtttccgcatacattgatctggataatgatccgaaatttccgtttggttatggattaagttatacccagtttaaatattctgatatgaatttaagctcaaataatcttaaaggaaatcagactttaaatattagcgtaaatgttaccaacagaggaaattatgacggggaagaagtggtacaactgtacatcagagatttgtttggaaaagtggtaagacctgtgaaggaactgaaaggtttccagaaagtattcattaaaaaaggagaaactaaaaccatcagtttcagtttaactcctgaaaatctgaaattttacgacgaccagctcaattacgactgggaaggcggagaattcgacatcatggtcggaaccgattctaaaaatgttcagacaaaaagaattaattggttaaaataaatattacttttttacttactaagagcgggataaaacccgcttttggcggtagaaggctgaacagtttttagaaggatattaattaaacacaacatttgtcattctgaaagaatctacataatactttagagatgcttccagcatgacagactttaaaaataattaaattaatttttaaacatattgttgtcattcagaacatagacagaaagtctacgaacgcagttcagaagcggagtgaagaatctaccaaacagtatttgagattcttcctttgtcagaatgacaactttggaaatgatcttaataaaatttttagcgcaaagatgtattcaaagtaacgttgattttaagggaagcaaagaatatcaacaagttgatttgatgaagctaacgtttatcacaatccttcatcagcgattggtcacaatatttgctcactaaaattttgtttaattaaataaatctttgcgttaaaatataaacctaaaacattaaactttgaaaataaaacttcaacatatttttcatttcatcatcggaggagcccttgttttttcaacagtacattgtgcttcaaacaaacccgattccaaccgaaagttaatctggagcgatgaatttaattataaaggattgcccgattctgcaaaatggaattacgatgtgggaggcgacggttatggcaataatgaagctcagttttacacaaaaaaccgtccggaaaatgcaagagtggaaaacggaaatcttatcattgaagccagaaaagaaaactgggaaaagaataaatatacttctgcaagattattgacgagaggtaaattttcctttcaatacggaactgttgaagttcgtgctaaacttccaaaaggtcgcggaacatggcctgcgatctggatgatgagtgaagacatgaaaaaatggcccgatgacggagaactggatatcatggagcacgtcggatttaatcaggggtacattcatgcttcggttcatacaaaaaagtataaccacatcatcggaacacagaaaacggatactttgattgtaaaagatgcaagtgaaaagtttcatgtttacaaagcagactggacaccggaaaaaattgatgtttatattgatgatcagaaatttttcacctatgaaaacaaagaaaaaatgtatgaagcatggccttttgaccagccgtatttcatcattctgaatcttgcagtcggcggcttctggggtggaaaagaaggcattgatgataccatttttcctcagaaatatgagatcgattatgtaagggtttatcaaagtaaataaaataaaggactccaaattcccctcctttggaggggtggataaattttcaaagaaaatttagactaggtggtttaatataaaaaaataagaaaagataataatgaagagattaattgtaagttgcttggttgtcggtttggctttcaatgcaaatgcacaaaattattggaagaaaaatacaggaaaaacggcaaaagtttttcttaccaactcggcagccaacgaaaagatggctgacaaaggcaccgtaaaattcgaaaaatttggtcagcccaaagaaacggatgcgtgtatttttgtagatccggattttaaatatcagaaattaataggaatcggcggtgcaattacagatgcttccgcagaaactttttataaacttccgaaagataagcagaaagaaattattgaagcctactacggaaaaaacggtttgggatacaccgttgtccgtaccaatatgaattcgtgtgatttctcaagcgattcttacacttatgttcaggaaaatgataattcgttaaaatcatttactgttgcacatgatgaaaagtataagattccgatgatcaaagaagcacaaaaattaattggaaaagattttaccttctatttctcaccgtggagtccgccggcttggatgaaatcaaacaaaagtatgctgaaaggaggaaggctggaaaacgcgttttaccagacatgggcagattattatattaaattcattaaagaatatgaaaaaagaggaatcaatgtttggggacttaccgttcagaacgaaccgatggcaacgcaaacttgggaatcgtgtatttattcggcggaagaagaaggggagttccttaaaaataatttaggtccgactctttggaaaaatggtttcaaggataaaaaagtgatgatttgggatcataaccgtgatttgatttaccagagagcaaccaccacactcagcgaccctgaaacttctaaatatgtttcaggaattggctatcactggtatgaaacatggaacaacaaaacccagcttttcgataatctgacggaaacccaaagagcatttccggataagtttttagcttttaccgaaggctgcaaagagcagtttgatatgtctaaaatttacgaagtgagtttaggcgaattatacggaaggaatatgattaacgatttcaacaaaggcacggctttatggacggactggaatgttcttctggacgaaacaggcggaccaaaccatgttggaaatttctgttttgcccctattattgcagataccaaaaccggagaactgcattatacgtatgaatattattatgtaggacacgtttcgaaatttgtaaagcccaatgcaagaagaataggaacctcttcaaacagagctgctttaacctcaaccacttttatgaatgtaaacggacaattggtaaccgtaatcatgaacgatacagacaataccatcgagacgaatctctggattgaaggtatggctgcaaaattatcggctcctgcacattctatacagactgtaattttatagacttcatattaacatttttattacgtttcggcggagccaaaggctccgccgaaactgttttattcaaaaatatatattaattggcagcaattataatctacactcttttacaaattcttcaaattgaaacataaaaaagccgaattcaataatccggcttaatttatataagagtaatgatttaaattattccgtatcatatttactgatcactctctgagtaacccccgaactgctgaaacctccgtcatggaaaagattttgcatcgttacttttttcgtaagatcagagaataacgttacacagtagtctgcacattcaagagcagtagcatttcctagtggagacatatcttctgcatatccaaggaaacctccgaaacctttcacaccgcttcccgctgtcgtcattgtaggagactgagaaaccgtgtttacacgaacttttctttcaccccaatagtttccgaaagttcttgcaatgctttcaagataagctttgttgtcagacatatcattataatccgggaatgttctctgtgctgcaatataagtaagcgctaaaatacttccccattcgttcatacagtctttttcccaagccactctcattactttgtggaaagaaaccgcagagatatcccagcctttttccaaccagtcgtagttcatttctgtataatgttttccttttctcacgttgatggacattccgatagagtgaaggatgaaatcgattttaccgaatttggcaacagcagcatcaaaaagcttttcaagatcctcgatagaagtagcatctgcaccaattacttcagatcctgttttctctgctaaaccgttaagttctcccattctcaaagcaataggagcattagacaaaataaattcagcaccttcttcatgacatctttctgcaactttccatgcgatcgattgttcattaagggctccaaaaataattccctttttgcctttaagtaaaccgtatgacataattttttaatgtttattattatacaaatgtagcaatatttgtgtttagtacataataaaaaacggagccttctgtaaaaagactccgtttttcttgaaaatatttatatgactgaaattttaattcgttttcttgttccattctgcttttacatcttcagcagcatccttcgttttttcccacgcatcattggctttatctttaacatcatcccatgcatcagcaaaattgttttttactctgtccagccagtcttcctgttttgcttcttcatcactgtttcttttttcattgatataatctttggctctgtctgccaattcttctaccttccattttgcgttgtctgccgcatcttttaacgagttttttgtgttatctactgcgttttctgctttgttgtattctgaattgttcataatgtgatattttgtttgtgtgattatgattaaacaagaaccattcctaaaattttttctgattgttaaaattttcataaacttttatttcggggaaggaagcggttttagaattattctttaatatttacagtatatattacaccagatttatatctactgaaatcttcattttaatgagtaaaatgaaactttgaaaaacttctctcatattatctattatgttcccataaatttttatttttaataattcaatgatttgaagtcctttgttttttcgttattaagttcatgaataattaatatttatattttctattttattacaattattgtattttaacacgttatatacccctgaaaccatcaatgtttatctctgtttttcttcaataagcagtgataaattgtgctttattcattttttcgtgatattttttattgataggtaaattttttaaaaaaggataaaattataaaaacactgttttactgtaatttaaagccgattttgtatagaataaattctatgtttttgatcattaaacagtgattaataggtgtatttattgcaaattattcacttgttggtgttaaattgtagaattattaaaaaaaatgaggttttattaaaaattattatatttgcattatcaaactgatagctatttaataaactagaaatgcaaaaacagacgaaacttcaaatacttattacagctttacttttttcaggctttacttttacatcagctcaggttgggataggtacctcatcgcctaatccttcggctatgcttgaaattaattccgctaataaaggagtactttttccaagtgtctctctggattccgaaaccgataacattaccattccttcacctgccgaaggattaatagtgtggaacaacggacaggcaggattggtagaaactggattcttttactggaacaatgcaaaatggaatatgctttccgtagaaggaagtcaggtaaccccagttgttcccggaggaggcggaactacttcagactggaatgattccgcaacgaacagtggaaccaatgcaggagcaaatactgctctcgctttaggaaccaatacctacgatgaccttatttttaaagtgaattctgtaaaaatgggaagactgggtgtagacaattccgtaagtttaggaccaatggcaaacgccgggcagaacggtatttcaatcggaacttcaagttctgcttttcagggagtttctatcggaaatgaagcctctgtaggcgcaaatgacggtttggcagtaggaaacaaagcaacagcagcggcattcaaatcaaatgcaatcggctataatgccaaaaccaataaaaatgaatccacagcaatcgggaataattctttagcggacggatttcagtctaccgcaatcggatataactcaaaaacaacagccaacgaatcttccgcattgggaaacaattcattcgcggcaggatttcaatcagtagcattaggttacaatgcgaaaacaaattccaacagtgaaactgcggttggattcaatacggtaacaaacggacagaattccaccgcaataggttccggcgcttctgcaacaggacaaaattccacagcaatcggttacaacacgacgacaagccagtataatgctatatcaatcggaaacagcagcgcaaacgtaggaataggaacaagtacaccgaatacgacagcaagattagacgttaacggacagtacaaattgggaagcaaaggaacggtaaataaaaaccagatcagttttgaggtttggccgggtgtttccgttaataatcttccttcaggaaaatccacaacaatggatatcgcgattccggcagctatggttccgacttcaacaagagcgacgattgtagtaactccggcttcggattttgcaggtaatgcaactttctcaatttcgaatccgagaatgacttctacttcaaatattaccatcaatcttaccaatatttcaggaaatgcagaaagtttatactctgcgcatttctatgtaacgattaatgaattttaatagaattgataaaatagtataatgcgtcaattcaggacagattaatcaatcttcaggaagtttaatttaatggttataaagaaaggatctcgcttatgagatccttttgatttattaatgttaaaagtataattatttgatgattctttccaatacccactcaataaggtttttctcagaagcatgatgatcggcggagaattctccacgtcttctgttggcaatcacgttatttacagtaattgctttgtgacctaaaagtttggataaagcatagattgcggaagtttccatttcgaaattggttatgccaagatcattcagtttttctaaaaactgatcgtccacagcttttaaacgcaactgtcttccctgtggagcataaaagcccgggaaagtagcggtgtttccgtgatattttgcatccttgtacaatgctcccaattcttccgcccagtctgcaaaatacagcatcggcttaattttcggataagggaatttttccataaaatttctggaaaattcattttcaaacgcataatcctgataaaaatgcattaagccatccaatcctacaacattctgcgtaaccagcatattatctacctgaacatcaggattcacacttccgcaggttcccattctgaataactgtaaagcagaatgttccgttttaaactctttatttttaagatcgatattcaccagcgcatcaagctcgttcatcacaatgtcaatattctcagtcccgattccggtagacattacagtgattctttcgcctcttaatgttcctgtatgcgtgtaaaattctcttttatttttctttacttctactttgtcaaaatattttgaaaccttcgcaacacgatccggatcgcctacaagaataattttctcagcaatatcttccggtaaaaggttcaggtgataaacacttccgtcttcgttcagaacaagttctgaagcagcaagtttattcagcataaattcgtttttatagtttaatacattgaaattgtgattgatttccgccaatctttaaaaatcctctcccaagatcctcatcattattttcagaatgtcaatattggaaattgacttttagtaatgaatttgatttcggggtttaaaattaataaaaaatacccgaactgagatgtaaacattatttaattcaaatttaaaattgtggtaacgtccgaattgtgcgctgttaatagatttgcgcaaaaaatttcatgagattttatccctttgctgcgatcctttttctgcttgttctttccgcaatgtctttcaatccgtcagataaaggaacaaaaagtgaaaatacatttgtcaatcaaggtttgtcggatttcaaaagtaagcttgaaaacttaaaagccgatgccaaaaacttttcggaagataaaatttcccttgaagaacttcagcagtcattaaaaaataccagaaattctttcaaggaaatcgagttttacgtcgcgtatcattatcctgaatttacaaaaacccacctcaacgcagcaccgctttttcatattgaagcagcgggaacttccgcttatacacttcctccggaaggattacaggttttggacgaaatgatattctccgatgaaggacttgaaaaaaaggatgatattaaaacaattgcagattttttatacaacagctacgcgagtttttatttaagtaccgtaaaaaatggtttaagcaaaggaaataataaaacattacctttaagaatcgagctgatcaggatttacagtttaggcgttacaggtttcgatactccgggttcgctgaatgtttccgatgaaaccgttcatgctttttcagggatgcaaaaatatcttcatgatgatccttacttcaaaaactataatattcagaaagccgatgaaatattaacggagggaataaattatctcacaaaaaatacagattttgaaacattcgacaggattgagttttataaaaaatacattcagcctttatacgaagaattcggaagctgggacggaagaagcgatgatctgaaagaattttcgggttggaatgtggggaataaaaactttttcagcagcgattttctggatccctatttttatacattattaaaaaaagacgaagataacggagatttaagaaaactaggaaaagaaattttttatgatcagaatgtgagtaacaacggaaaaatgagctgtgcaacctgccatttaccggaaaatgcgttcaccgatttaaaagcaaagtctccgagtaatgtagagggaaaaaccgtgctgagaaattctccgtctttgtataacgcggtttttgccaaaagatttttctatgatttgagggctttttaccttgaacaacaggcagaacacgtcatttataataaagatgaattcaatacaagctatgaaagcatcatcaaaaaattaaaaacaaaacaggaatacagaaaagcctttaaagctgcttttaagaatggcgaaatcaataaagaaaacttttccaaagctttgagttcctacgtagcttcattgtattcttatgaaagcgattttgatcggttcatgagaaacgaaaaagaaatttcatcggatgcgaagaaaggttttaatcttttcatgggaaaagcaaactgcgcgacctgccattttgtacctaacttttcaggtctggttccgccgttctttaatgaaaacgaatctgaagttttaggaattaccgcaaaaccaatcagccagaaaccgttggaattagatgcagatctgggaagaatcaacagtcctgtaagaaaggaaaattcatggatttatgaaaagtctttcaaaacagtaacggtaagaaatgtggctttaacgaaaccttattttcacaacggtgcttttaatactctggaagaagttatggatttttacaacgaaggaggaggtgaaggtcttggtttacaggtgaaaaatcagacgctggcttcggataagctgaatttatgtcaaacagagattaaacagattattgcatttttgaattctcttacggatgtaagcaggaaataataacttatcagacatttattacgcaatattattagatatttaattatttttggcaaaattatggcttagattaatacatgatgaaaagccagatagctttagttaaaaaatatgaatgacacggatgctgttataagcgcactggagactgctttcaatatcaaattagaagaattagaaaaatgggaaagagtaagtcaaacggaagggaaatcctattatgatggatggcggaagctatatctttcaaacatacactttgaaaatttctctgctctcgaacctgtttttgaaacacttcgctacctgacattgatagactgttcgattggcagtctacaggatttataccgaatgaagctgtggtgtctcacactgaagaactgttcggtttccaatgaaaaaatgtttgatccggatcatcaaaaagtagagccgtcttatctttattttcaaaatttgaacctggaaaacatggatattccgcatcccggatttttcctacctatttccaaacatttggaatatgtcacatttaccgactgtaccgttggcaatatatgcgaattaaatcttttccctgcgttatatagcctggatatcgataataccaatttcattgagtcggcagatgatattcaataccagcgaaaacctgacgggcattttacttttttaagttttgataacatgaaattgaaggacttcaattcctttatttcaatttcaaaaggcttaagtcatttaagtttgtacgattgtgaagtagagagtttaaaaagtgtctgtcaattcacggatttgaaagagttatatataagtcctgatctaaaaattaatgatctcagcattcccgataatgacttaatacaatttgaattaaaacaatgcatcattctcggagcaggatcttatgatccggatgaagatttgataatacctgattttgatgtaaaacttctggcttcaattgcaccatacatcaaaagtttgagcataaattcccataatctgattaatatccctcatttaaagcattttacaaaactaaatgagttgaattttgataaatgtgctatcaatctggagaattattcatcaattgcccaccaaattcaagcaattgatattgataccaccaaaatagaaaatcaggaagctttcaagtattttacccacctgcaagaaataagatttacaaccaattataatgaaagtgaaaattatatagatctaaaaaaacttctgccactaaaacaccacataaaaaaaatttatataccagatagagagacagtactaaacgtagaccagttaaagcattttactgcactggaagagctttatactaaggcagattctcttgaactcgcacaggatatcttatctattgaatcactcaaagatctttctctctatattgctgaacagactccggaaatcacggaagccgtagccttagatttgcagcagttaaaaaatatcgaggaattaagcgtcagtgtgcgtgataacgtaagttttaaaggaattggtgatttaaggtctttaaaaacacttacaattgacactgattttgatgttgaaaatttaatagccctgccttctcttcaaaaactatccatagagggaagagttatcaatagattacccagattagagcagattaaggtgctcgatttgcaaattgaagaagatagcgaaatagcgttacttaaaaattttccaaacgttgaaaagcttcaggtgcgtattccggaagaacaaaaaatagatatctgcggattagaaaaattaagagtgctagtcttcgactgcaatgatttaaacagtatagccgcttttgaagatcttcctgctcttgaagaattggatctcagcaattgtggacttaccacgatatttaacttggataagcttaccaatttaaaaatgctaaatcttgaggaaaatgccattgaaagtatcgaagggttagagaatctaaaaaatctggaacgcctgaacctttatgacaacaaaatttctgatatcagtctcgtgaataaactccctaagctttatcaggttaatattgcaggtaacgaattaaatgaaaaagatgtcgaaaaacagcttgataaaccggagatcgcaacgtggtatggcagaccttatactccttttcgtataaaaattgactaaaaaatgaaaccaattatcacatccctatattcttcaaaggatgtaagtgaaaaaataattgatcattcaaggttgtatttaaattcttcttactgcaaaaagaaatattcttactcctaatagaaatatcttacaagcagaaagaaaaataccaaatagcaattattttcacgatattaagttttagatagtctacagctatatgttgtagactatttcttttcggatatattttaatgttttttttaatttaacataaaattcatgtaattaacattcggttttccattaattaatattttcgaatatttatttaaaatcctattaacagggactttgcttcaatccggtagttttgcactgtttaataaatcgaaattttaaaatgaaaagaaaactactaacagttgcagctcttgcaatggtcacgggttcgttcctgaatgcgcagacttttatttttaacaaaaattctgcatggaaatacaacgatagcaatactgctttggcatcccaatggaaaacagcaacttatgatgtttccacatggtctcagggaaacggaccgcttggttatggtgatcctgtaacgaccacaacggctacaggacttatcacggcttattttgcaaaagattttaccgtaaacttaaacgatctttcttccactatggaattaggggtaatgagagacgacggaatcgtagtttatcttaatggagaagaagtagtaagagacaatatgccttccggaacaatcgatttcaatacactatcaagtacaacaatcgatggagcagcagaaagtgtttacaatgttttttctattccaaaatccaaattcgttaacggaaacaacagaatctctattgaattgcacaacagaggcgcttcgagttcagatttaagaattgatgcttatcttaaaacaacttcaaccgtaactccggtttcttgtaacgccaatcacatcagttgttttacttccatcgttcctaccgcacagacgaataaactaatcattccaacagaacataaatatcagcttatccttaaagaaggtgacaattatacagaaggaggtggtttagtaggaggacagaacgatttcacagcttatgttccgaaaaatgcaagcagtaccaacggatatctttctgtaaaccacgaaacaaatccgggaggagttaccatggcggaaattaattataatgctactacaaaactttggcagttgtcccgatcaagagcagtgagcttttcggctccgagtctggttcagaccatcagaaactgttcgggaggcgttactccgtggggaacggtagtaactgcggaagagcagaccacttcaagcgacgttaatgcagacggaatgaaagattacggatggctggtagaaatagatccggcaaccgctcaggtcatttcccagaatacagacggatctaaaggaaaactttggcaaatgggaatcatgaatcacgaaaacgtagtgatcaataatacaggaacaatcgcttattatggtgaagacggcggaacacacatggtttacaaatatgtcatggatactccgaacaatctttcttccggaaatctttatgtgctgaaactggatcagggattaagcggaggagatcctgttgcaacaaccgcaacgtggattcaggttcctaataaaacaaaagcagaccagaataacactaccgctttggcacagtctcttggcggaacgtctttcaacggaatcgaagatgtggatatcagtccgcttgacgggaaaatctattttacggcaaaaggtcttaataaagtataccgattaaaagatgacggagccacagcttctcaagtggaaactttcgttggaggtcttacgacgaactattctttcgacacggcgcagggaacaaagaccgaagcttggggagacggaaacgacaaccttacgttcgatgagcttggaaatctttgggtgcttcaggatggtggtaaaaactacatctgggtaattgctccggatcatactcaggcaaatccgaaagtgaaactattcgcatcgatgcctgcaggatcggagccgaccggacttactttcacgccggatcacaaattcggattcttctccgtacagcatccggattctacgatttcaactgatattgatgcgactggaaatacgattgattacagaggaaaatcggcaactgttgttatcgctcttaaaaacaatttaggaactacaggttcattaggaacaattgatgcgcagacagaaaatacagtaactgttgctccgaacccgacttcaggattggtgaagatcaattctccgaaagggttgaaaaatattatggtaacagcgtacagtatcgatggtaagattgttttcacccagaaatattcaggattgaataaagttttagacttagactttacaagacagcttgaatcttcaagagtactggttttaaacatcgaagcggaaggaggattccagcagacggtaaaattgcttaaaaaataaattattaatatttacataactgccggtgatgatatattgccggtagttttttatttgtatgaaaaagctctttttttctatttcatttttaatactttcacaggcaaaagcacagattgatcctgtaaaatatccgacgtataccaatgtggatgacgcaataaaaagcggacaaaccatttacagtgtgagtttcagaggaaaaaccatgttcaatcttccggttgaaatccaaaagttaaaatccatctttttcctgaatttaatggaaaacaggtttgagaaaatggatgagtcaattttcaggctgaaagaacttaccattttaaacttaaacgaaaacagcatcaaatatattccggacgaaatcgcagaacttcagaaactggaaagtttttctattaatttaaatagtttaacgaagataaacccgaatttggcaaaacttcagaaattaaaggtgatccatcttgatgccaataatctgaatgtttttccggaagctttattaagaattccgagtctggaggaaattaatttgcagggaaatcagatcagttttattgctaaagatttagatcagattaaaaacctgaaatcattaaatctggcttccaatcaaattaacgatttgggagatttaaaattccctaaagacttaaaatatatagagttacagcagaattcaatttcaaagcttcccgaaaatttatttcagtcaaaaaatctggagtttttaaatgtaagccaaaaccatataaaagaaattccgtccaaagtaaaaggactgaaaaatatagtaagcatgaatttagcaaacaatcagctaaaagatcttccttccgagttttctcaactgaagaatcttaaaacactgatcttaacaggtaatccgatggaaaaatcaaccatcgaaaagttaaaaaccatgatgccgcaaacgcagatctatttttaaaaatcttaaaattattttaacggaacatttgcaaggcttccactatcatttgctgaacgaagtgccgttgcgaaagagaatattttcaggtaagattagaaaactttcgcggtcatagcgtttgaagaatttaaaattgaaaactatccgccaactcttttcgttttatagcccatttctttaaggatattcataatcttatcacggttatctccctgaatgataattgttccatccttttcagaaccaccgattcccagtgtggtttttatcttttttgaaatttttttcaggtcttcttcacttccttcccaaccttcaacaaccgttacgggctttccgtttctgccttttttctcaaatttacacaccaaaggttccttttgtctgaactgttcttcaggcatctcaaaatcctgctcttcatgatcaggaaaaaggtttttcagttgatctcttaaatccatacagcaaaattaataaaatatttacttttttgctattaactaaaaagtaaaatacgtttatactaaaaacaaattttaaacaaaatttaagtccgtcaattgttgatttcatttcaaaataaataaatttgtaggacaaaagtttatacaaaatgtcgaaaaaagcaatattagcgatccttgacggatggggattgggaatgaatccggacgtttcagccatagataaagcaaacactccttttatagataactgtcttaaaaattttccgcatacaacactcgaagcgagtggtttagccgttgggcttcccgcaggacagatgggaaattccgaagtgggacacatgaatttaggagcaggaagagtagtgtaccaaaatctggtaaagctgaatatggcgattgaaaacggatctttaggacagcagaaagtcattcaggatgcttttgattatgctaaaaaagaaaacaaaaaagtacatttcatcggtttggtttccaatggaggagtacattcacatattaaccatttaaaaggacttttaacggcagctcacgaattcggactgaatgaaaatgttttcgttcatgcctttacagacgggcgcgactgcgatccgctttcaggaaaagggtttatcgaagaacttcaggatcacatggaaaaaacagtaggaaaactggcaaccgtagtcggaagatattatgccatggatcgtgataaaaggtgggagcgtgtaaaactcgcttatgatgcgatggtagaaggagtgggagaacagtcgacggatgcattggcttcaatccagaaatcttatgataatcacgtgacggatgagtttatcaagccgattatcatgatcgattccacacagacaggaaatgtggttccgattgctaaaataacagatcaggatgtggtgatctgcttcaatttccgtacagacagaggtcgtgagattacggaagtactttctcagaaagatttcccggagtttttcatgagaaaactgtcgctttactatgttacattaacaaactatgataaaacgttccagaacgttcatgtagttttcgacgaagaagttttgtacgaaacgatgggcgaaattttagaaaaaaatcataagacgcagatcaggattgcggaaacagaaaaatatcctcacgttacctttttcttttcaggagggagagaagctgaattcattggcgaaaaaagattgctttgtccaagtccgaaagacgttccgacctacgatttaaaacccgaaatgtcagcgtacgatattaccaatgcaattattcctgagctggaaaacgaaaccgcggattttatctgtctgaattttgcaaacacagatatggtaggtcataccggagtttttgaagcagccgttaaagcagccgaaacggtggatcaatgtattgaaagagttgcaactacagcttacgaacacggttatgccgttttcattttggcagatcacggaaattctgatgtgatgattaatccggacggaaccccaaatacacagcattccaccaatctggttcctttcatcgtaatggacaaagatcagacatggaatcttaagcccggaaaattgggcgatgtggcacctacgatcttaaaagtgatgggagtggaaattcctgagattatgacaggcgatattttagtcagctaaaagataaaagttttaaagaatgaaatcatggttaaatgtgacaggcttttcaaacttaaaaaaggacagtagaaaaaatcctaacgaactttaatctaaaatattatttaaaattcagaaataataaagataaaatgccgttattatttacatagcggtatttttttatgactaatatcagaaataattaacaaaatattatgtcctaaataataaataaaactataaatttgcagtttaatctaaattctaaaaatgtatcaaaagcttgtaaggaaagaagtaatgggaattttggaaaaggaggtaggttcttttctgaataaatttttaacgccaatcgagaaaatctggcagccttccgattatcttccggatccgtcgagtgaagattttaaacatgatttagaagaaatacagacgttcgcacgcgaaatgccttatgatcttttcgtaacgcttattggcgactgtatcacagaagaagctttgccttcttacgaatcctggttaatgggagtagacggagtagaccaggagcagaaagaaatcggctgggcaaactgggtaagagcttggactgctgaagaaaacagacacggagatcttttaagcaaatatctttacctgtgcggaagagtgaacatgagagaagttgaggttaccactcaatatcttattaatgacggtttcgatctgggaacaagcatggatccttacagaaacttcatctatacaagttttcaggaaactgcgaccaacatttctcaccgaagagtaggaactcttgcaaaacagtccggaaacgggaaattagctaaaatgtgcggagtaattgcagcggatgaagcaagacacgcgaaagcttacaaacattttgtagaaaaaatccttgagatcgatccttcagaaatgattcttgctttcgaagacatgatgcgtaaaaaaatcgtaatgccggctcacatgatgagacagtccggacaaaaagcaggagaactttggggacatttctcagacgcagcgcaaagatgcatggtatatacaggacaggattacatcaatatccttaaagaccttctggacgaatggaaaatcgaacacgtaaaaggtcttaatgaaaaagctgaaaaagcacaggaatatttaatgaaacttcctgcgagacttcagaaaatcacggacagaatttcaacgccggatcttcagtttcagttcagttgggtgaaaagttagttctataattggataaattataaagtaggagtgctaagtgtttttagcactctttttattttgtatctttgcatttctaaatcttaaatataatgatgaataataagaaaattgctgttgatttcgacggaaccattgtagacgatgcgtacccaggaatcggcaaggcaaaagtttttgctttcgaaacactaagaagacttcaggcggaaggtttcagattaattctgtggacatacagacacggaaaaacattagatgaagcagtagaattctgcagaaaaaacgggattgaattttatgcagtcaattcaagttttgaaggagaagttttcgatccggaaacacaatccagaaaattagatgcagactggtttatcgatgacagaaatctgggaggttttccgggatggggcgaaatttacaatattattcaggaaagaatagaattccgcgtggaaggaaaagaggttttagcctattcaaaactaaaaaaagaaaagaaaaaaggattattctggtagaatttagaaattagaaggtaggtgttagaaattagtctgagatcacttttaattatttatcagaaaagtaagatgtttagaatgagaaaatttattcattaagttgtaaatctaatttctggcatctaatatctaacatctatataaaaaatgattcagttaaaaacaatagacgaattacgtcttatgaaagaaagtgcccgtttggtttccagaacattaggaatgttggcgaaagaaataaaacccgggattaccactttatatttggataaattagcacacgatttcatcaaagatcacggtgcagaacctgcatttttaggatatggaggatttccgtactctttgtgtatttctccgaatgaccaggttgtgcatggttttccaagcaaagaagaaattaaagaaggagatgtgctttcggtagactgtggtgcagttctgaacggttttgtgggagatcatgcctatacttttgagattggggaagtaaaacctgaaaccaaaaaacttttaaaagtagccaaagaatctctttataaaggaattgagcaatgcgtaagaggaaagagaatcggggatatttcccacgctattcaggctcactgtgaaaaagaaggatacggagtagtaagagaattggtaggtcatggtgtcggaagacagatgcatgaagatccgcaggttccgaattacggaagacagggaagcggaaaagtaattaaagacggattaacgattgcaattgaacccatgattaatctgggaactgaaaaagtgaaattccataatgatggatggacggtgacaacattagacaatcagccttctgcgcacttcgaacacgatgttgcggtaatcaacggaaaaccggtgttgctttcaacattccagtatatttatgatgctttgggaattgtaagcgatgaagaaaaagccttccaattggatttttaatgaaaaaagtcactaaacttttactgaataaaattccgcgtccgatgctgatcaaaatgagcatttgggcaagaccgcttatctatcagttctttaaaggcgatgcgttttttgatcctattgacggaaaatcttaccggaaatttcttccctatggatacggaagtcagcgcgaaaacgctttgtcgccgggaacattgagtctggaaagacaccgccagatgtggctttacctgcaaaatgagaccgattttttcattaaaaattataaagttctgcatattgctccggagcaggaattccttcgaaagtttaaaagaatgaaaaacttaaactacatttctgccgatcttttttcgccgattgtagatgtaaaagcagacattcttgatcttccttttgaaaatgaaagctttgatattattttttgcaaccacgttctggaacatattgaagatgatgcaaaagcgatgagcgaactataccgtgttttaagaccgggaggttggggaattcttcaggttccgatgaaaaattctctggaaaaaacgtatgaagattttacgataaaagatccgaaagaacgtcagaaacatttcgggcagtacgatcacgttcgctggtacggaatggattatttcgaccgactgaaaaaagctggatttgaaacggatattaatttctattctaaacagtttaccgaagaggaaataaaaaaatacgggcttagagaaaatgaaattctgcctttagtgtataaaaaataacaaaaacgtcttcgcaatgaagacgtttttgctgtattaatgataacaaacaatttattctttaataaacttcaaaggtttttgtccttcaatcattaaaatatattgtcctttttcaaaattttgagtgtcaatttttacttttttgtcgtatgtcttaccttcatacatcatttgtccaagcatattgaaaacctttacaggaagatcattttccagatttatcacaattaaattatcttttacaggattttcaaaagaaatggtggctttgagggtattctcttttgtagataaaatggaactgttgtaatagattttattaccattagaaggatttgttatgattaaagtctttcctgaaccattgggaatcacctgataattgtaaacctgaccaattgccggattaacgtaaaagtcgcagtttttttgatcatatccttgtacagccgtcatattatttccccagtaatctgccaacgtacatcctgcagaactgttcttaataaaggaatcatctatcgtagaaaaggtaagcggtattccggaaacattaaaatatttggaagtaaaaacgttgcttcccgatgaattcgaaaatgtagaaggctgaagagactgatccatcgtaggagtaacggttgtttgtcctcctataatcatttgtgaaatataccagtttgtattgaacagttgagacgtattttgagctaataaaagaccgccgcaacacaaaagaagtaaagtttttttcatggtagaaattttctcaaagataattaaaattataaactttctgtaataaaaaaaaccgctttcaaattctgaaaacggctttgctataaagcatttaacaagattataaatttatctttaatttttttaatgtgcagaaacagctttcagtccaaccacagatccaattaaagtcacaataaagaaaattctccaaaagcttaccggatctttaaagaagaaaattcccattaaaacagttcctaccgctccaattcctgtccagacggcataagcggttcctataggtaaagtttgggtggctttaatgagtaaaagcatgcttaccgttaaagagatcagaaaacctgcaaaccaaaagtacattgttgttccgcttgtttcctttacttttcccagacatgaagcaaaggcaacttcaaatagtcctgcaataattaagataatccaattcatttttctgtaattttcaactgcaaagttctgtaatttggaaagaataaaattttacaattgttaaaaaatctaccgtaaagattagaattcatctatccacaccctaaaaccctaaaaccctcacactctcaaaccctcatactttacagcctaaaaaacactacaacttaatctccgctcttattctacttaaactcacttgcgaaatccctaaataagaagcaatatgaccaagctgaacccttctgatcaggtcaggtttatttttaattaaatctttatatctttccagagccgttttgtattgccttgagataatgagctcctctgtttttaccagttctctttccgcaaattttcttccccaattcgctatatgaatatcctcgttgaataattttttaagatgttctgtttccagtttgtagaattcgcagttttccagcaattcaatattttcgtatccgggattattttccacataacttttcatggaaaccacaggttcgccctcacttccgaaccagaacgtaatgtctctgtcttctgtggatgcgtatgcgcgtacaatccctttttttaacaaatatatatgagaaattactttttcagcttccatcagacaaaaattcttgggataagaaacttctgtaatgtattgtttcagttttatttttgagatttcgggaagtaagtaaatgcggtcgagaatttcgtcaatttccataattaagtcttggataatttgtctaaaatattggttttaacaacagaaaacaagaaaattattctcctgtgttttgaattaaattaaaaattaagtaaatttagaagatcaaacgtttaaccaaaataacagtcaggaagtaaacaatgattgatattgaattaatataccaataatttaaatttgaaattaattttaactaattgatttttaatgttttgaattttattttgtttcggttttgaaaaactgccaatctacaattattttcaaaacgaccaaaaaaaacgtctattgttttttatattttttatgaaatatttttgcatcaaagtcagaaaattatgaaaagagcttctattaaagatattgcgagaattgcagaggtttctgtagctacggtttcctatgttctcaataaaaaagaaggaagcagaattagcgaagccacaaaaacaaggattctggatgtggcaaaaagcatcaattatacaccgaacaaaattgccaaaagtctgaaaatgaataagaccaagctgatcggactgattgttgcagatatttcaaacgacttttactccaacattgcaagaaatattgaagatgaagccatgaagctggggtatacacttctaatcggaagctgtgatgaaaatcctgaaaaatttaaaaaattaacggagcttttctcagaacagcaggtcgacggaatgattatcgccccggttgtagattcggatgaagccatcaataaacttattcttgaagaatacccgatcgtaaccatcgaccgttatcttaaaaatgtaagtttaccgggagtaatgatcaataattcagaaatttcagaacagatctgcgatcatctggtgaaaaaagactttgacgaaattatttatgtaggttacaatacagaacttcctcatttgctggacagacaggacggttttgaccgaagaattgcaaaatctgatatttcggcgaaaagaatcttaatcggaattcataatattaccgaagaagtgcatcagaaaatgcaggaaaatctggatctttccaaaaaaacggccatttatttttcaagtaataaactgggaattgcaggtctcagatatctgatcgatcataatatcagtgttccggaacaggtttcattggttgcgttcgatgagactgaagcctattatcttttcccgacggaagtttcatttgtacagcagccattgtatgatatggcaagagaatcggtaaaacttttggataatcaaataaacaattatacaacaaacggaaaaagagtaactttccatgctaaatttatggaaagaagttctgtaaaataataaaatgataatgacagaagaggtaatgacgacagaaaaaagaccatatattgtatgttttggtgaagttttgtgggatattttcccggaaggttcaagagcaggaggcgcaccttttaatgtggcatataatgttcataaaatgggcattgatgtaaaaatgctgagcagaattggcaaggatgaactgggagaaaaattaaccgataaaattaaaagttgggagattaccacagattttattcaggtagatgaagttcatcctacgagtacggtgatcgctaaaatagatgaacacaatgaagcgagctacgaaatcgttgaaaatgtagcatgggattttatagattttcttcctgaacaccaagatttggttgccaatgcgaaagcttttgttttcggaagtctttctgccagaaatgaaaagaccagagaaaccttgcttcaactgcttgaattggcaaaactgaaaatttttgatgtaaatttcagaccgcctttcatcgattttgaattcattaaaatattgttgaataaagccgatattgtaaagatgaacaaagcggaaatgaagcagattcttgaatttatcgggaaagaatataaaagtgaagaagaaagtgtttcattcattcagaaaaaatttcaggttaatgaaattattttaaccaaaggaagtaaaggtgcaggttattttgtgggagatcaaaattataattttcctgccgttcccatcaccattgcagatacagtgggaagcggcgattcttttcttgccggttttatttccaaaaggattcagaatcaggagcctgaagaaattattaaggaaggaattgctttaggagccttcatcacttcaaaatcaggagcgtgtccggattacagttattccgaatttcaaaaatttaaagaatcaaaattctaataaaaattaaagactttttcagaccggaaaagtctttttttgtcggtaaaagtttccaattaattccaaagaccgattaagtttagtaactttgcaaatcctaatataatttttatgcacaaagcaggatttgtaaatatagttggaaagcccaatgccggaaaatctaccttgttgaaccaactgatgggggagaaactggcaattgtaacccaaaaggctcagacaacacgccacagaattttcggaatttataatgaagaagacttacagatcgtattttcagacactcccggagttctggatccgaaatacggtttacaggaaaaaatgatggattttgtaaaggattctttgcaggatgccgatgttttccttttcattgtagatgttaccgacaaagctgaaccttcggaatttctgattgataagctgaacaaaattcctgtgcctgttttgcttttgctgaataaagtagaccagaccaatcaggaaggtcttgaaaaactggttgaaacatggcatgagagaatcccgaaagcggaaattctgcctatttctgcattaaatgcttttaatacagacattattttaccgaaacttaaatctttgctgccggaaaatccgccttattacgataaagatcagtatacggataagcctgaaagattctttgtaaatgaagcaatccgtgagaaaatccttttaaattacgagaaagaaattccgtattcagtagaagtggttacggagcagttcaaggaaaaggaaggaattatcttcatcgattctattatttacgtggaaagagatacccagaaaggaattatcatcggacataaaggagaagcgatcaaaaaagtagggacagaatccagactggatcttgaaaaattcttcaataaaaaaattcacctgaacctttttgttaaagtaaaaaaagactggagaaaaaacgacagagatttgaaaaattttgggtacagatagactaaaaaccacctaaaagccgttctattagaagaattttcactatctttaaatgtaaattgcttttaatgaactattcgaacacaacaaattcagattctgttttaaaagatgttgcattgcttatcgtgcgggttttcattggctttgccatgctctctcacggttttccaaagcttcagatgcttttagaagggaagtcagatttttttgattttttaggattaggatcgcagatcactttaggcttaacggttctcgcagaatttgcctgttcaattctccttattttaggattattttcaagaatttcattaggatttctgatgtttaccatgattattgcgggtttcgtcgttcatggagcagatccttttgaaaagcgggaaatgagccttatctatctttccgtgtatctcttactgatggttttcggagtcggaaaattttctgtcgattatatgatcgagaaaaggaaaagagccaatgattggtaatgattccacaatataaattaaaaagagcagttattttcaaccgctcttttttgtttttctaagggttgcagggaagattggacggaatgcagctccatttcggaagttcactcgtttcatcgattttcatgcagggtttgtatcctgaaggacattgcggcgcatttccgccattcatggcgcgaagttctcttcgctctaattttcttagatttttcataatgattctgaatttgatgaatactaaagataatattattttgttaaatcccataaaagtgttttaatatagaattgtatattctctaattttcattaatttcgtggaaattgaaattattatgaagataagactgaccatatgccttcttgcgttcctcaatttctatgaagcgcaggaaaatattacgtatcaaaaaccatctgcggaaatcctgaaactggcagattatgaaagaccgccaagtgttttgatgaacagtaaaaaagactggatcgttttcacgtatcgccctacttataaaacactggaagatttaagtcagcaggaaatgaaactgggaggattgagaataaatccggtaaccaatatttcaagttcagcaacgtatgcgaataacctgaaagtgagaaaaatgaacgataaaatggaagttcaggttaaaaatttaccttccaatccaaaaatcgccaatacatcattctctccggacgaaaaaaaactggcgtttaccaataccaccaataaaggtgtggagctttggattgtagaccttgaaaccgctaccgcaaagaaaataacttcagataacttaaatgcaaatttgggaagtccttacatctggtacaaagactctcagaatttattgatcaaaacccttccgcaaaacagacctgctctaatagattccagcaaagatcttccgacaggtcccattgtttctacggcagatggaaaagtttcgcagaacagaacgtatcaggatcttctgaaaaatccgcaggatgaaaagaattttgaggttttaaccgcttcagaaatttataatgttgatctgaacggaactttaaagaaagtaaaagatcaggatatgtattccggattaagcttttcgccggacggaaattatctgatggcgacaaccattaaaaaaccgttttcttacattgttccactaagcagatttccgatgaccactacggtgtatgacatgaacggaaatgtggtgaaagttgtaaacgaaacacctctgaacgaaatcatgccaaaaggattctcttccgtaagaaccggaaaaagagatatgggatggagaagcgatatgcctgcaactttggtatatgcagaagctctggacggaggagatcagtataagaatgcagaattcagggatgagatttttacctgggaagcacctttctccaacgcaccgaaatcattctttaaaacaaaacagagatacgaagatgtaagctggacaaatgatcattacgccattgtttccgaaggttggtacgatacaagaaatacaaaatctttcctggttgatttaaataacggagaatctaaagtcattgacgacagaaattatcaggatgtgtacagcgatcccggaaatttcaatacgacaaaaaaccagtacggaagatacgttgtcgacatgaaaggaggaaagtcttacctcatcggagccggatttacaaaagacggacagcatcctttcattgatgagatggatgttaaaaccatgaaaaagaaaagactgtatacttccaatcttaaaaatgccaaggaagaaattattgatattttaaatcctgccaaaggagaagttcttacgattcagcaatcttccagccaatatccgaattattttaagaagagcattaaatccaataaaacagaagcggtaaccaattttgcgaatccttttgaaagcattaaagatgtttacaaagaagtgattacctataaaagaaatgacggcgttacacttaccggaacactttatcttcctgccaattacgacagaaaggcaaaaacagaaaaattaccgttgctgatctgggcttatcctaccgaatataaagataaaaatacggcaggacagaatacgcagaatccaaacgatttcactttcccttactacggttctttcgtgtattggacaacgaaaggatatgccgttttggatgatgctgcattcccgatcatcggagaaggaaaaacagaaccgaatgatacatttattcctcaattggtagcgaacggaagagctgcgatcgatgcggtagatcaattaggctatatcgacagaacgaaagtagcagttggaggacattcttatggtgcttttatgacggcaaaccttttgacccattctaaagattatgcttgcggaattgcaagaagtggagcgtataacagaactttgacgccttttggtttccaaagcgaacagagaaattactgggatgttccggaaatttataacaccatgtcacctttcatgaatgcagataagatgaaaacgccgctgttattggttcatggagatgcagacaataatcccggaacgttcactttgcagacggaaagatattttcaggcgcttaaaaatctcggcgctcctgtaaaaatggttcttctgccaaaagaagctcacggatatgccgcgaaagaaaatattcttcatttgctttgggaacaggatcagtttcttgagaaatgtttgaaaaaataataaattaattgattatccgctattattcatattgtttttttaacgcaaagactcgcaaagattctttatatactaactgtttttaagttcgcaagggcgtttcactcagcaaagaactcaaagatttttccaattatgacaaataacggacaatcatataaattaataaaaactcgttcaattttggacgggtttttattttctttgtcaaaaaattcaaatgccaatcttaagacgttcagaacaaaatcaacagtcgcttcaggatttttacagagaatttctacccaaaccaagtgatacatttggaaatgcaggaattccgatgcttaaaattttggattttatgaatgatacttttaaagataccttttatggtttgacttcacatgcacatttgcttttattcagtaatgatgaagaggatcgacattatgttgaaattataggatttaaatcagaatctcacgaggtattttcggtacggtatttcattccggaacataaaagtccgtggaaaaatgctgttgtaaaaggtgaaacgacacaatttgaagagtttaaaaagatgattatcatttctatgatggaatctggtggttggaaagataatttagaactgatgaattttcagaaaatcatctaaaatttgttttaaaaaactgttcccattttgtattagatttatttctcgctgattttgctgataatgcagattcaattcaatcggagaatatgttaagaaaaataatactaaaaattacagacaattagattcaggcagactttacctgaacatcaaaaaacaatttgattacttacattattcatattctgtttactttagtttttgtaattttcagcccgcaaaattcagtaaaaaataaaaaacaggggacattgattccgaaaagatatgttacgaaccaatcagacatttttagactaccttgaaggactgtacagcagtgaagaacataagggaaatattgttttaaagtcttttgaaaaaggcgataaaatattaattcaaaatcagatttccacaaagatcatgctcgttaaaagcggcattaccaaatgctatttcgtggaagaaaacgggaaagaatatattgttgaatttatgggaaaaggagagatcatcggtgaaatcgaagtcatcaaaaacgttccctgcatctgcagcattgaagcgattacggaagttaccgtttattcgatgtcgattccctattttcaggcattgatcaaaaaagaccttaccctcaataatttattgttggatgtttttgcagagcgcattttcaatacttcaagccgcgcttcttatcagcagcttcacaaaacagaacatacactttcacaactgttggaagtgaaatccagagaaatggaaatttcaaaagaagacatggcaacctatctcggaattaccgtggaaagcctgaaccgagctttggaagagcttcaggagaataattctgaggaataaattcaacagatttaaacgcttcttttatctttgcagaaatatgctgaaatcaatggaagaactgaaattcaggaatgctgaactgaaagatttgcccaaaattgtagaaatttacaactcaaccattccttcaagaatggtaaccgccgatacagaaaatatctctgtagaaagcagaatcgaatggtttcatgaccacaatcctgaaaaaagaccactctggatcattgaaaatgaacagaatgaagttttaggctgggttagtttttcatcattttacggaagaccggcatacaacggaaccgtggaactcagcatttacatggacgaaagttcgcgcggaaaaggctacggaaaaaaagtactgcaatactgcattgataacgcaccaaaatttgaagtaaaaacattattgggattcatcttcttacataatgaacccagcctgaaattattccgatactttggttttgaagactggggtgtttttccgaatgttgccgttttggacggtcttgaaagaactttggtgatcttgggaaaaagagtaaggtagtttgttcttgtcaggagcaaagccatcttaaaaagtttattttttaggagctttttcccgctttcactactcgcttttttaggtttcggcggcagcgaagctgccgccgaaacctaaaaagagctcaaacatgccgttcaatcggggctaggatcggtacagaatataactaaatacatgacttcactctttgtcattccgtaggaatctggacaataatttttaaacaatttctaaaaaataaactgagattcctacggaatgacaaactaaccgctttaatgagttgattaagcttataagagatttaaaataaaatgattttaatataagaaccacaaaaatatcaataggaatgggctttagaccattttaatccgtaagaaagaaaattggctttagccaaaacttatactaaacttccgctgaagccgattttgatttgcaatctttacatcttgaccccaattatgcgataaattaagacatagaaaaaataaaaaagcgatccaaaaaagaccgctttcctattacaaattctgcttaattctttttgcagacatattcaaaaaacgtttgaccagcatgaccgcggaaaccgttaatcccaatcctaaagcgatccacattccaaaagcacccatttccattgttacacaaaggaaatatcctaaaggaattgtgattacccaatatgcaataaacgtgtaaatagaaggaatttttacatcctgtaaacctctcaacattcctaaagctgtcacctgaattccatctgataactggaataatgcggcaattatcattaatttagatgctaaagcaatcacttcaacttcctcttttttagtaaaaaatgtcggaagaatatttcgtccgagaacaaaaacaattccgcagatgcacataaagataaaggcaattttcagattgttgattcctacctttcttaattcaacgaaattctgttcaccgagttttctcccaatcataaccgttgaagccacactgaacccgatgcataaattaaaagtaaaagaagccatacttaaggcaatctgatgagaagcaatatcgtgtgccgaaatcagtccgcagataaaagcggctcccgcaaaagcagtcacttcaaagaacatctgtaaagccgtcggaaaaccgagtctgatcatcttttcaaacattttctttgaaaaaacttcaatttttaaagaaaaatctttgatgtactgtttcgttttattctcattcgaaagcacaaaatacagaaaaaccaccataaaaattctggcgattaaacttgcaagggcagaaccttttacccccatttccggaaaaatccaaagtcctttaatgaaaacataatttaaaacaatattaatgacattagcaataatggttgctttagtaactccgatggtgtaagaaagcccttccgaaacttctctcagtgtctgaaaagccataaaaggaacaatactgattgccataatcgttaaaaaatcaaccgtatccggaatgattttctccggctgtccggatttgtaaagcagcggcattcccagaagtaaaattgccatcagcaaaattcccaccgtcatattgatgataaagccatgactgaagacagaattaatcgtcttatggtcatgtttcgaatgcgcttccgaaaccaaaggcggaatcgcaaaagaaaatcctaaagccaatacaaacatcgagaaaaacacagcatttcccaatgaaactgaagccagagcatcggctccgagaagatttcctacaataatattatcaaaaagattcactgaaacctgcccaacctgcgttaacatcacaggaagagccagagtcaggcattctttcgtatagtttttattcaaaaaggtcataattatttacatatagtttttattcaaaaaaaattgcagtaacaaatgatactgcaattttcataatttatttaaagtaatcattacattacttccttacaaaacttgcaacgtcttcggcagaaactgtgttccctcctaaaataatcaatctttctacaacgtttctcaattctcttatgtttcctgtccatgaaagcgcttttaaagcttcaatcgccttatcatcgaatttctttacagcagtaccgtgttcatcagcaatcattccggaaaaatgctcgaccagtaatctgatgtcttcttttctttcatccaatggcggaacatagatttcaatcacagaaagtctgtggtaaagatcttctctgaatcttcccgcttcaatttccttttgcatatttttattggttgctgcaagaactcttacatccaccttaatctccttatcgcttcctacaggcgaaactttgctttcctgtaatgctctcaatacttttgcctgagcaattaagctcatatctccgatctcgtcaaggaagattgttccaccgtttgcctgctcaaattttccctgtttatctttaatagcacctgtaaaagatccttttacgtgaccgaataattcagattcaatcaattcagaaggaatcgccgcacagttaacttctaccatcggacctctcgctctgtcactttgattatgaatggcatgtgcaacaagctcttttccagctccgtttggtcctgtaattaaaacccttgcatcagaaacagccaccttttcgatcatatcctgaattttcttcaagcctgccgattcgccgatcatctggtattttttatttacctttttcttcagcgttttattttctgtctgaagatttttattttctttcttcagcgtttctttggctaaagcattttttacgctcgtaatcagtctgttgatgtcgattggcttagaaatgaaatcgtaagcaccgtctctaaggcatgaaaccgcagaatcgatatctgcgtgtccggaaatcataataaaagtggattccggcttcagtgctaaactttgctttaaaagttcagtacctgaaagtttaggcattttaatatcggaaatcaccagtgcgaaatcttctttttctacctgtttatagccttcaagtccgtcttcggcgattacaaattcatagtcggttagttcgtcagaaagaatactgtgaagtactcctgagattgctttttcgtcttctacaataaggattttttgcatagttgcaaatttagatttttttgattgaattattagcaaaaactatacctaatcgtctaattagaataatctcttctcccgaaaatcgccgatcccactcttacggaattggcaccgcattcaatggcaatcggaaaatcgtcactcattcccattgagagggtttctagttttttcagttgatttaattcatcaaaaagatttttcaggtttaaaaattccttctttacctgatctttatcgtccgtgaaagttgccattcccatcaatccggtaatttcaatattctgaaattctccgctgagatactgttcaaacaaatctttggcttcattaatatccagtccgaatttgctttcttcttcggcaattttcacctgaagcaacactttgatggttcggttgtgctttgctgcttctttattgatctcacggatcagcttttcagaatctacgctttggatcgtatccacaaattcagcaatatattttactttattcgtctgaagatgcccaatcagatgccattgaatgtctttgggaaggagcggatatttttctgatacttcctgaactttgttttcaccaaaaactctctgtccaagatcataaacttcctgaatcgcagaaacaggatgtgtttttgaaacagcaaccaactgtacatcagaaggaagctggcttttaatatgattataattttcctgaatactcataatggcaaatttccgaattttaaagacgaaaagctaatgaatattgaaatttttagatgtgagattctttttagtctaaaacagaatgtctgtcattctgatgaaggaagaatctaagttttattgttaaagattctttactccatttcgtttcgatcagaatgacagacatacaatatattaaatttcaatgttgtccgaaaaacgtataaacaaatttatgagctcaatgttgattgcacaaatcgacagttcgctcctctggagctttttttgatggcgtctttttttctactaacagtaaatcccgatgggataaatgcagctccattaggagcaacctgttcatagaaaataattattcttagaatttaagctccggaggtgcgaccttataattgtgtttcaatgtttatcggacaaggatgattaaatttaattcaaaacctcattaattttaggatattccgagatttttctgaaaacaaaacggttgcttttctgaagtttttcaataaaaagatcgagttcatttatggaatctgcatcggttaaatactggtcatgcgtaagaaaaaccagatgtcttgaagttttttcaagatcattaaagaaaatactgtccacttttttcagcatttcttcatgttttccctttaatgccattttattggtcggtttccactcaagatcccaaccgatcactttataacctgcctgttttagcttattcgcagcttccgttgaacttttcaggtcggttacggtaatgttattcagtctccagatatttcttccgggagttctcgcgattttatcatagagtttcagactgtcttttgccgcattgaaatcttcaacaacacccgccggatttttgtaaaaatcggtgtatttgttgtgcgcgtgcgtgaaactgtgattcgcaagttctattaaatgatcttttcttaacagttccagatcttcctgctgctttttgcttccgtaagcgtgtttgcccacaagaaatgcggtggcgcagatattcctcttgtgtaaaattttcagaagattttcggttccgcgattgggaccgtcatcaaaagtcagataaattactcttttatctgtggaaacattttcatcatcaagtttggggacaatttttgcgacgggatggtctttcggaattagtttttcagattctttcttgtcttttttttgattacagctgttgaataagattgaagttgcactcaccaatgcaagcatcccgagaaaagtcttgtttctagacttttccgcaaaagtttttgtcataaaattaaatggaattttgttgttaaaaattgttaatttttccaaattattcttaacaaaaattacgccaaatttcacttaattttgactttttaagcttattttaataaaatatttttactcgagaattttctttaaatacagcgaatttttaatggcggcatttccccaggtgttattgaaaaagataaaagatttatgttgtgaatttttaatcttttcagctaatttttcaagaaattcattactgtattcagatttgtaaagcacaggttttccgtgaagccgataatataaaacttcagaatcgttgataatgacatcttccggtagatttccgggaaaactgacaccggaaaaaatgaccttattttcttccaaaattttaaataccgcttcattccaccacgattcgtgacggaattcaatgacattcagataattgaaattaagattattaaggattaaatcaatattttcctgagtatttttaaaagagggagggaactggtacaaaaatccggaaagtttttccttcaaatgagattcaatatgataacagaattctgaaatttcttctttgcattctctcagtcgcttttcatgggaaatggttttcggaattttaatgaaaaacttaaaatcatcgggcgtttcgtcataccatttcaacaaagtttttgcggtcggttttctgtaaaatgtagaattgatttccacacagttaaattccgctgaatacaacgtaagaaaatctttacttttcgcgtcttcaggatacaatgaacctttccagtcattattgtagaatcccgaacagccaatgtatagatcttcttttttcatattgttactttttgctttcgcagatttaggagataattgtactgttgttatttacgtttattaataagtctgttttaaacaaattcagaattaaccgcaaaagttgcaaaagacatttatacagcgattatcagaatttttaaagttctcaaaagaataaaaatcaaagatttttaaaaactattgtagttttttttattgataatcagcgactttagtctccaaatctgcgagaaaaatttactcaatatccaaatccaccgaattcagtctcaaagagtttaaaattacagaaagagaactaaaactcatcgtcgctgctgctatcatcggagataacaggattccaaaaaacggatacaataatcctgccgcaaccggaacgcccaaaacattatagataaaagcaaaaaacagattttccttaatatttttcagtaatttttcacttaacagtctggcttttgcaacgcctaaaatatctcctttcagcaaagtaatttctgcgctttctatggcaacatcggttcctgttcccatcgctattccgatatttgcctgagctaaagcgggagagtcgttgattccgtcgccggtcatcgcgacaattttcccttgtttctgaagtttttttacttcgtttaatttatcttcaggaagacagtttgctttaaaatgtctgattcccaattcctctgcaacggcttttgcagtgttttcgttgtccccggtcatcatgataatgtcaattccttcacttaataactgctgaaccgcttttttagaactttctttaattttatcggtaaaactgatgaatcctaaaacttcgttttcctgagcgacataagaaatggtatgtgctttcgcctggatttctttcgcattttgttttatattttgaggaataaaaatctgatgtgaggttaaaagaccttcgtttccaaggaaaattgtttttccgttgatgtttcctttgattccttttccggaaatattttcaaattgttctactttttcaggagttatactttcagcttttgcctttttaatcactgcatttgaaagcggatgttccgaattctgatttaatgaataggctaattttaaaatgaatttttcgtctttatcaactgtttcaatatgttctaaggatggtttcccttcggttaaagttcctgttttatcggtaatcagcacatttaccttattcatctgttcaagggcttcagcatttttaattaaaattccgttttttgcgcctttacctattccaaccatcagagacattggtgttgccaaacctaatgcgcaaggacaggctacaattaaaacagcaaccgcattgacgaaggcaaacagcgttttttgaccttccggaccgaaaatctgccacagaataaaagttaaaacggcaatcaatataacagcaggaacaaaaattttagagactttatccgtcagtttctgaatcggggctttgcttcggctcgcttcgttcaccattttaataatttgggaaagcagggtttcgtcgccgactttttccgctttcatgatgaaaacctgatttccgttgatggttccggaagaaactttatcattaacgtttttctcaacgggaattggctctccggtaatcatactttcgtcgactacggaatttccttctgttatttttccgtctaccggaattttctcccccggttttacttttaataaatcgccgattttaatctgtgaaagcagtacttttttctcttctccgttaacgataagattggcttcatcgggagacaagttcatcagttcacggatggcgtttcctgtttttttgtgcgccgcagcttccattaactgtcccaaaataaccagcgttaaaataacacagactgcttcgaaatataatggagtttcatgatggctgccacgaatttcatgcggaattatatcaggaaaaattaaggcgacaatactgaaaataaatgcggctgcaactcccagaacaatcaggctgaacatatttaagttccctgttttgaaagaaacaaatcctcttttcattaaaaaccaccctgaatacaagacaacaggaagcgttaaaatcaattcaaaaattccctgaatttgacgagaaaaaggaaaatcaaaaaacatcccgcccatcgaaagaatgaaaacaggaatggtaaaagccagtgaaatgatgaacttattttttaagatgttgtaggtttcatcttcttcttcgtttttgtcgggcattcttacgagatccattccgcagatggggcagtctcctggctcatcacgaatgatttcaggatgcatcggacaggtgtattttgccgcttttttctcaggatgttttacgagatccattccgcaaacaggacatccgacattgctgtcgtagactttatcgccttcgcaatacatcggacaatagtattttccggccatttcatcggttactttcggtgcttcttgatgatgatgggagtgatcgtgaacatgatgttgtgaatgagcggctgaattctttaccaaattttccgtgatttcttccagatgcatattgcagacagggcagtcttccttttcaggataaattttatcgctttcgcagaacatcggacagtagtattttccgatattgtctttgaaattttcaggcagatttgtttgggaataagccggtttaaaattaggatctttagcgtgtttttcctcaatgggaacaagatacatattgcagactggacatctttttccctgctgaaaataaactttatcgccttcacattccattgggcaatagtaaaccgaagacggagaaactctgtcctgtggtttaatgaaggttttttcaggattgtccggatcttccagtttgtagttgccgatttcttcgagtgctttatttaaagtattgatttcaaattctttgtcggagataatggttgccgtattgttttcgagatttatatcagcttttatgttttctaaactgttcagcttttcagaaatctttttctgacatccggaacaggtcattccgagaattttatattgcttttccatgatccttctgatttatggtacaaatttctaaaaagcaatcggaagcctgttataaatttaaggataatgtttacagaattctgtcttatgagtgggaggggttttgtgtttgagggtattagagttttagtgtagaagtgaaaatccaaacgattttaaacccaaaaaaaactctccaattctcaaacgctccaacttaaatctgatccagcggttttctgttgtgaattttcagttttttaaattcagtaggagtgaagccggtgctgtttcggaactgggaagataaatgctgaacacttttatagccgagttttcctgcgatttctgttaaagtaaattcattatataaaagaagttcttttactttttcaattttttgaagaatgaaaaactgttcaagcgtgatgttttcgttctgagagaaggtttttgaaagagaactgtactctttatggagtctggaggttaaaaattcagacaaaagaaaattttcagcgatatccagttcgctgatttttacaataattaaatttttaattttctcaattaactgatgggcagaatcttttattctttcaaagcctgtttttaggagaagattttccagtttttccatatcatgaactgaaatatcttgctgagtctccacttctccgagagtgattgattttaaatgaatacctgcttcagcaaatatagcttccacagcagaaatgcatctgccgcagaccatattttttatgaagattttcataaggagctttggttgttcaatctgtctttcacaaattccactttcgtttttccgtgaggaacaggatttccgttttcgtcgagatttaccataacgattctgtcgacggtgatgatggtttgatgggtcattttgtttcgcacttcacatcttaaagtaagggaagttgagccgaacgccgaaacttcgatcccgatttcaatgatatcaccctgttttgcggagcttacgaaattgatttctgagataaatttggtgactacttttttattttcaagctgaataactgcatacaacgcagcttcttcatcgatccactgcaacagtcttcctccgaaaagagactgattggggttaaggtcttcaggttttacccattttcttgtgtgatagttcatatctgaaattttactgcacaaatttagcttttataactggctttgtcaaaagatttagattcagtaatccgaaaagaaatatttatattctcagttatttcttttggagcgtatggtttttacttttgagattcatgttttggatttaaatttatccaaagtaggaggtcacggtgttccgttattttgtagatgtcactctttttaatgattattcataaatatttcatgataaattaatactttttaacgaaataatattttgattgaaaaatttattgaaataatttcaaaaaaagctttgatatgaaattaataatcgtatcttgcacctgtattatatctggaatcaatatttgttcattctttatgttgtttttcttttataaaccaaatcatttttaacttattttaattttattaatcaagatgaacatttttgtttcaaacatcaactacgcaactaaagattatgagttgcaggatttattttcagaatttggagaagtttcttctgtaaaaatcattacagataaagaaactggtcgttctagaggtttcggatttgtcgaaatggaggacgcagaaggacaacaggctattgaagctcttaatcagaaagaattcaacggaaaagaacttaacgtttcggaagctaaaccaagagaagaaaagccaagaagaactttcaacagcaatggtggaggtaacagaggtggcggttacggaggtaacaacagaggtggcggtggctacggtggcggtaacagaagcggtggcggtggctacggtggaggagatcgcggcggaaacggcggtggaaaacgttggtaaaaaatataagcggttcttttggaaccgctttttttatgatcttttttaaaggaattattctttttccttcttttttttctttttcctgtctttgtctttttccttatccttgtttttctttttctcctttttaggattcagaatttcattggcatactcaaattcttcttttactttcagaggttttatctctattgcaggattaagttccttcagatcttcctgagaaattaatttttcctgaagcagaagatttaaaatttccttgcccgaattatcaaaaaaattatgcgaaagttcttttaataaaaatttacggtaatcttccaaaggtacgatcacggagtatttaaagatccttccttccttttctgtagaaaggtatcctttttcaactaatattttaaggtaagtggaaacggtattctggtggggtttgggttcaggatgctgttccataatatcctttaaataaaatgattccagcttccagaacagcttcattaaattttcttccgcagatgtaagatgattgattttcatataaattcttaatgttgaaactgaatattgcaataaaggtaaagaaaagatactataaaagcaattccggctcccatgaacacctcttttggggtatgccgttttagaataattcttgtaattcctacgagtatcgcaatgcctaaccagatgattcccattgtggtattcagcgcaaaaaataaagcagctacaaatatattaaatgctgtatgcatcgaacttttgatgaaataattgctgatctgcaatgcaaaaagcaatatcagaataaagagcattacaaaatcgatctgtccgtttctgaaataattaaagccgatatacgatatcacagaagctgcaataaaaatatataaagtttttcgctgtaccctgttggatacatccatattggtatatcttcccgtttttacattccagaccaaccagataatgacaggagcgattactattattaatataggaagaaatgaggtaatggcttctttaagagagtatttcagaaaactcatgtaaacgaaaaatataaacagagagagcagaggattgaaaaaatcggatataattcttgatattttatgcaataatgaaggctgtttttcttccatattaaggtttaatgatgtaaatataatactataaccaaaaaaacaataggtaggtatacaataaaaatgaagttttttttataattttgctcaactatttcataataaataagcaagagctcaacacatgaaagaattttctaaagaggtatacctgaagtggtatgaagatatgacaatgtggagaaggtttgaagacaaatgccgttctctttatctaaaacaaaaaatcagaggttttttacatttgtataacggtcaggaagcgatccctgcaggttttacgcatgcaatggatttaactaaagatagtatgatcactgcttacagatgccacatccatccgatggcgatgggagtagatcctaaaagaatcatggcagaactttgtggtaaagctacaggtacttccggaggaatgggcggatctatgcacattttcagcaaagagcacagattttacggtggtcacggtattgtaggaggacagattcctttgggagcaggtattgcttttgcagatcagtatttcgacagaaaagcggtgaatatctgtttcttcggagatggagcggctagacagggttcattacatgaaacgtttaacatggcgatgaactggaagcttccggtaatttttgttgtagagaacaaccagtatgcaatgggaacttctgttaaaagaacagccaaccacgaagatatctataaattaggtttaggatacgaaatgccttgtcttgcagtagatgcaatggatcctgaaaaagtcgctgaagcagcttatgaagcaattgaaagagcaagaagaggagacggacctacttttattgaagcaagaacttaccgttacagaggacactctatgtctgatgcagaaccatacagatctaaagatgaagtggctcttcataaaaatgatgaccctatcgagctgatcaaacaaagaattttggctaacaattgggcaacagaagaagaactggaagcgatggataacaaatcgagagattttgtggaagagtgtatcgaattcatggaaaactctccttatccggatgcagagaagatctacgagtatgtatatgctcaggaagactatccgttcttagataaattagaaaactaaaagataataaatcggtttgaaagtttgaaaatttgaaaatgatttattatcatatcttttttaattttcaaattcataaaatcccaaattttcaaattataaaaaattatggcagaagtaattacaatgccacgtctttccgatacaatgacggaaggaaaagtggcaaaatggcataaaaaagtaggtgataaagtaaaggaaggcgatatcttagctgaaatcgaaactgataaagcggttcaggattttgaatctgaaatggaaggaactcttttatatgttggtgtggaagaaggtaatgcagcagcggtagattctgttctggcaattatcggtaatgaaggagaagatatttcaggacttactggtggtgcagcagctccggctcaaggtggttctgaagagaaaaaaacagaagaagaatctaaaactgaaaacagttctaccactgtggaacagacttctgcggaagttcctgcaggggtggaagtaattaccatgccaagactttcggatacaatgacggaaggtaaggttgcgaaatggcacaaaaacgttggagataccgtaaaagaaggagatcttcttgctgaaatcgaaacagataaagccgttcaggatttcgaatctgaattcaacggagtgttgttgaaacaaggcgttgaagaaggaggagcagctccggtagattcggttttggcaattataggacctgaaggaacagatgtttcaggagttggcgctccgaaagcggctgcttcatcatcagaaaaacctgctgaacaaaaaactgaggctaaagcagaagaaaaaggggcaccggctgcagatcattcatctacagacagagttgccatttctcctttagcgaagaaaatggctcaggataaaggcgtagacatcaacagtattcagggttcaggagaaaacggaagaatcgttaaaaaagatattgaaaattatcagccttctgcggctaaaacagcggcttcagctccatctgcaagtcctgcggcggctcaggttgcattaagcttcgtacagggtgaagatacggaaactccgaactcacaggtaagaaacgtaattgcaaaacgtctttccgaaagtaagttctctgcgcctcactattatctgatggtggaaatcaatatggataaggcgatcgaggcaagaaaagagatcaattctttaccggataccaaaatttctttcaacgatatgatcattaaagcgacagctgttgccttaagaaagcatccgcaggtaaattcaagctgggcaggtgataagatcatccacagaggaaacattaatatcggcgtagcagttgcaattcctgacggattggtagttcctgttcttaagaatacagaccagatgaactatacccagatttctgctgcggtgaaagatatggctgcaagagcgaaaaacaaaggccttaaagctaatgaaatggaaggttctacattctctatttcaaacctgggaatgttcggtatcgaaactttcacaagtatcatcaaccaaccgaattctgcaatcctttctgtaggagccattattgagaagcctgttgtgaaaaacggacaaatcgtggttggaaacatcatgaagctttcattagcttgtgatcacagagtagtagacggtgctacaggagcacagttcttacagactttaaaaacatatctggaaagtcctttaacattgttactgtaattttctgtttagatatacaattttaaaaaggtttaccggaagaaattcggtagacctttttgcttttaagataattttaaggtgattttaatatggtcacaaagattttagaatgatccttgctacttttaaaaaatgaaattgagcagaataaaattagacaaacaaaatatttttcttttattgctgatcgtaatggttgcagcaggtaaactgattcctttcagaagcgaatacaatcagtattttaatctatcagcatttatagactggggaatagcagcaatcttccttctgtatggactaaagctgaatatcaaagaaatcatcaaagatatttccaactggaaactgcatcttttggttcaagccggaacatttattatttttccgctgctcgtctttttgttttatggttttgtaaaagataccgaattttttgtgacgtggctttccatattttttctggcaagtctgccttctacagtatcatcgtctgttgtaatggtttctatcgcaaaaggaaacgtaacttcggctattttcaatgcttccatttcaggaatcattggaattgtcatgactcctttactgatgagcttttttgtacagcccgatcaggaaaatattaataacgcagaaattattcagcaattgttgcttaaagttttactgccgatcattttaggattaattttaaatccgctattgaaaaactgggtgacaaagtatgcgaaaattattgcggaatttgataaaatgatcattttactcattgtctacgaaagtttctcggaagcgttttcacaaaatgtatttgcctcagttccatcttctgtattcctgattattgcagtcagcgttatcactttatttttctcggtatacggaattttaaaattaatttcaggaaagcttcattttaaaagagaagatgtgattacagctactttctgcggatcaaagaaatcccttgttcacggaagtctttttattatggttttggggattcccgaagatcataaagtgctgtttttgcttccggtaatgatctatcatagttttcagttgttttatgtgagctggcttgccaataaaattgagaaaaaatatcgactggaaaatggatagtcgctgtaaattatatttttattgcttttcagatttaaatcaattcactatttttgaatcatgattaaagcaaggaatatccataaattttatgggaatttagaagtactgaaaggtgttgatattcatatcaaaacaggagaggtggtttcaattgtgggagaatccggagccggaaaatctacacttttgcagattctgggaacactggatcagccaacgacttccaataaatttgatacggaaattgaaattgccggagaatctttcatcaatatgaatgataagcagctttctaaattcagaaatcagaatatcggttttgtatttcagttccatcagttattgccggaatttacagctttagaaaatgttctgttgccgacaaaaatcgcaggtgccaacgaaaaagaagctatagagaaagcatatgctctgtttgaagacttaaaaattgaacagcgactgcatcataagcccaatcagctttcaggtggtgaagcgcaaagagtagcggtggcaagagctttaatcaactcaccgaaaattatttttgctgatgaaccaacgggaaatttagattcgaaaaatgcagatgatcttcacagattgttttttgatttgagagataaatacaaccagacttttgtgatcgttacgcataacccgaatttagcagaaattacagaccgaaagctcgtgatgaaagacggaatgattattgaataaaacttccgcaaatgatgaaaccctttatttttttatttcttttccttatttcgtgcaccaaatttgattctcaggcttcaaatactgttgaagatttgcctaaatctaaaattttggaagtaaagaattttattaaaggaaaaaattataatcagaaccttgctgtttttatcaattttaaaattcattcaggaaagtaccgttactttgtttacgatctgaagaataataaaattttgcagaaagcaattgttgctcatggtgacggatctgttgtgaaaaattcttctgccttgaaattcagcaatgttgatggttctcaccagtcttctttaggaaaatacgaaatccgggaaagttattccggaaaattcggaaaagcctatcgactggatggtctggatgaaacgaacagcaatgcaagagccagagcaattgtactgcattcttattattgtattccagacaaagaatctgcaaatcctgcttgtttaagttttggatgtcctatgctttctaaaagtgcattcaacgaaacttcaaaatttattgacggttcaaataaaaccattattttgtatgctttttactaattttattttcaaaacttaacaaatgcctattaaatttcttgccgaagacgacagaccgagagaaaaatttttacagaaaggtaaaagttcgctttctgattctgaactgcttgccattattatgggaagcggaagcagggacgaaacggcaattgaactggcaagaaaaattttagcatctgttaataacaactggcatcagttaagcctgttgtctttaaaagatttaatgaagtttaaaggagtgggagtggtaaaagctatttccattattacggctttggagatcgggagaagaagagcaagtcaggaaattcctgagaaacctgtgatttcaggaagcgatggagcgtatcagattttcagaaatcatttgtcggatcttaggactgaagcattttgggcaatttttctgaatcagagcaacagagtcattcatcttgctcagcttacgcaaggaggaattaatcaatcgattgtggatattcgagtcctttttaaaacagctttagatcatttttcgacaggaattattgtggcacacaaccatccttctggaaatctgaagccaagcagagaagatattgaaatcactcaaaaaataaaggaagcaggaaaaatgctaggaattcagctcctggatcatcttattgtgacacagaattcatactttagtttctcagacgacggattattatgattagaagattgaaatacaatgaaatagattttgataaatattctaagtgtcttgaaaattctgcacagaaaaactggtacgcgagaaaagaagttttagatcagctttcgggaaactggcatattttggtttatgatgattatgaagcggtgatgccggttcctttaaaaagaaaatttgctttaaatttagtggttatgccgcttttttgtcaacaactgggtgttttttcatctaaagatgattttaaaattaatgatcagttcctgaattttctgaaaaacagatataacatattttcatactctttcaatcattataattctttttctcaggatttggacaaaaagaaaaattacacaatccagatttcagattacatccttttgagaagaaaaaaatatttcaaaggaagaaaatctactgcaaaatgcgctcaacatcttatttataaagaaattgatttcagcgaagaaagcttttctttcatgcagaaaaactttaaagggctttctaaagatggagatgtagaaaaatacagaaaatacttaaattttctttacaccaataattctctgaagctttcaggagcctatctggatgaaaaactcattaatattgcggtattaattgacgaaaaagatcagctttctttgttgggacttattaactatgaagagtataaagatgaaaacggtccttcctttcttattgataaaattctgagtctttatattcatgaaaagaaatttaattttatgggaagcaacatccggggaatagaggttttttttaaaagttttggcgcagaacttcaggaatatcctactctcgaaaataaaattctgaaaaagttcttttagattagacattggattttttattgcggatttttcatgtatagattgagaaaatattactaattttgctacctcaaattatgacaagtttttcaggatatttaccctatgcttttgcattgattattgcaataccatttttggttttgctgagacagtttgtatttacttatattaaacttaaagaacaggaaatcaggttactttctgtaaagtccaattccgaaaataaaacccagtcttacgaaagaatgacgctttttatggaaagattaaaaccttccaatcttatccagagatttgataaaggtcttgcagcccatgaatttattttcctgactgaaaaagcgatcaatgaagaattcgattacaacgcttcccagcaattgtacatcaccaaaaattcatggaaaaacattgtcgattccaaaaacgcagttgtagaacttcttcacagaacctacgaaggaatcaacggaaatgcaaaccttgatgagttcaaaactatttttctgatgaactatatggaaggagaagactatatttctatgaccattgaagatttaagaaaagaaattttaataatagcttaactaaaaaaataaattttaaataatgattccaaattttaaagcacatccatggcacggaatttctgcaggagaagatgcgccaaatgttgtaaatgttttcgtggagatcgttccttcagacactattaaatacgaagtagataaagaaacaggatttttaaaggtagacagacctcagaaattctcaaatattattccggcattatacggttttgttccaagaacctattgtgacagcgcagtaatgaatttagcggttgaaagaggcgctacagacgttacaatgggagatcacgatccgctagacatctgcgttttaagttctcacaacattcacgcaggaggtttgttaatggaagctattccaatcggaggtttcaaaatgatcgatggaggtgaagcagacgataaaatcgtagcagtaatgatcggagatcacgcattcggacatttcagagatatttcagaattgccggaagcagaagtgaaacgattaatgcactacttccttacttacaagaacttaccggatgagcctgcaaaatgcagaattcaggaagtttacggagcagaacatgctaagaaagtaatcaaagcttctcaggaagattattcaaacaaatacggaggataaattctctttatttcagataaattaaggatagacggttttcgtttatcctttttcttttaagagttctgtattgtaataagaattccgaaatcatacctttcgaaaacattaaaaatgagatattgtcaatctttcattaatttaggagctgtttcctgctttccactgtatcttttttgttacgggctccgcttcgcttcgcccgcaacaaaaaaggatgtcgtttcaatcagggctaatcattattactttagtgtaatacaaaccaaacctcataggtttttaaaacctatgaggtttccgacagcaacattccatacagaacaaaaactcctcaaaatcctttcaatttaatttacccaaaacgttttggtgtcaattgctgaatgataattccttagagaaaactttcttaaaaaaaaacaaaattcaatttgcacaacacaactcatttaatcgtttaactcctaattttgaaatacttataaatattttaacataatccatagaaattattcgttatatttaatatctattaccaaaaaaatattaaactatggatctatttgtgttagtaccaatttttggtgttgttgctttactgtatactttttttcagagtaactgggtaagtaagcaggatgccggaaatgaaaaaatgaaaattatcagcggacatattgctgacggtgcaatggctttcctgaaagctgagtacaagattttaacctatttcgtagtcgtggtagcgattcttttagcagtgatggggatgagcaatgccaactcccactggagtatcgggattgcctttgtagttggagcaatattttccgcatctgcgggtttcattgggatgaaaatcgctacaaaagccaacgtaagaacggcacaggctgccaaaacatccctttctaaagctttaaaagtttcttttacaggaggttccgtaatgggaatgggcgttgccggtttggctgtcttaggattgggagcattgttcttaattattaaacagatttttgcaccggatgcaaccgtagattcccacgaaatggaaagaacgattgaaattcttacaggattttccttgggagctgaatctatcgcgctttttgcaagagtaggaggaggaatctacacaaaagcagcagatgtgggcgccgatttagtaggcaaagtagaagcaggaattcctgaagatgacccacgaaatcctgcaaccatcgcagataacgtaggagataacgtaggagatgttgccggaatgggagccgatttattcggttcttatgtagcaacggttttagcaaccatggttttaggaagagaaaccatttctgaagattctttcggtggttttgccccgattcttctcccaatgctgattgccggaacaggaattattttttcaataataggaaccctgtttgtaagaattaatgataatgaagactcttccacttcaagcgtacagaatgctttaaaccttggaaactggggaagcattgtaattacggcaatagcttcttattttttggtaaattatattctaccggacaagatggttctccgaggacatgaattctctaaaatgggtgtttttggggcgattatggtaggattggttgtcggtactttaatgagcatcatcacagaatattataccgcaatgggtaaaagaccggtttcgagcatcgttagacaatcttcaacaggtcatgccaccaatattatcggaggtctttctgtagggatggagtctacattgcttccgattatttttttggcaggcggaatttacggatcatatctttgcgccggattgtatggtgttgcaattgccgccgcaggaatgatggcgacaacagctatgcaattggcaattgatgctttcggaccgattgcagacaacgcaggaggaattgccgaaatgagcgaacttccaaaagaagtacgtgaaaaaacagatattctggatgcagtaggcaatacaacggcagcaacaggaaaaggttttgcgattgcttctgctgctttaacggctttagcattattcgcggcttttgttgggattgcaggaatcgacggaattgatatttacagagccgatgttcttgccggattatttgtcggcggaatgataccttttatcttttcatctctggcaatcactgcggttggacaggctgcaatggcaatggtagaagaagttagaagacaatttcgcgaaattcccggaattctggaaggaaaagcgcagccggaatacgaaaaatgtgtagccatatcaaccgatgcttccatcagaaaaatgatgcttcccggagcaattgctattgtttccccattactgatagggtttattttcggacctgaagttttgggaggctttcttgccggagctacagtaagcggtgttttaatgggaatgttccagaataatgcaggcggagcctgggataatgcaaagaaatctttcgaaaaaggagtggatattaatggacaaacgtattataaaggttctgaacctcataaagcttccgtaacgggagatacggtaggagatccgttcaaagatacttctggaccttcgatgaacattttgattaaactgatgtctattgtttctttagtaattgcccctacattagcagtaatgcataaagacaaaattgaggctaacagaaaagctaaaattgaagctttaacaggagtttcagcagtttcattaactaatcagacaggatcaacagccgttgttccgcaggaaataaaaggctatgttaatgaaagcggagattttgtgtatgacacaggaaatattcaggagatagaactaaaaggcggaaagaaaataaaaataggagaaggaagtcagttgtaccaaatggttaattcagttagaaataaagatcagggagttttggatccgaataaatggtttacgatagaaaatctttactttgagacaggttccagtgatttaaaagcaggttcggaagttcagttattaaatttagttgaaattatgaatgcttatccaactttaaagatcaaattgggaggctacaccgataattcaggaaatgaagaaagcaatcagaaactttccaatctgagagctcagaccgcaaaactgaaactgcttgaactgggaatttcaggagacagggtggaagcagaaggatacggttctcagcatcctgtttgcgcagccaacgatacggacgaatgtatggcaaaaaacagaagaattgatgtgagagtattatctctttaaaaaatcaaccttaaatatagaaagcactgcgtaatgcggtgcttttgttttaaatatcatttaaattttcctgccaagaaatctgttcaatcaacaaaataaaatatttcctgatgtcattttgacaaaggagaaatctaaaaataaagaaatgaagatctttacactgacagtaattttaaagattctttttcaaatattcaagcgcattaataatcagatcatcattcttagcaaaactgaaacggatataatctgaattctgtctggaattgtaaaaagcagataaaggcagacatgatactttcttttcgatggtcagccattttgagaattctacatccgtcattgttttcgaaacgcttctgaaattcacgatttgaaaaacggcaccttctgctttttgttccacagtgaaaggtgtttctttaatcagttcattaaaaagatcacgctttttttgcattacagtatgattttccgaagcatcaaaaacttccagatatttggctattgcgtactgacacggcgcatttgcgctataagaaatgtattgctgatgacagcggaattttgccgttaattcttcaggtgctaaaagatagccgactttccatccggtagaatgaaacatttttccaaaagaaaaaatacagaaagttctttttttcagttcaggatgaagaaacgaactgtaatgttcctttccgtcaaaacaataggtatcataaatttcttccgaaatcagataaatttcctgatgtttaatgatgctatataattgattccaatcctgttcagaccatatttttccggttggattttgtggagaatttacaatgatggcttttgttttttcagaaatacaatttttcagtttttcccaatttatcgaaaaatcattatcaagatcataataaacaggaattcctccattcagaaaaatagaaggaccatacgtgtaataagaaggctgtataacgataacttcatctccctgattcagaatagatttaagggaagcatataaagcaaaggttgcacagggaacgattgtcacttcattttggtgcaatcttatgctgttttttctgttgaaattaaaacggattacattttctatcaacagaggatttcctgcaagtggttcataatgatgaatattgagatcagcagcttctttaagatactctctcagacggtaatcaatatcaaaatccggtaagcccaaagaaagatcaaagctgttgtttttcacagcaagttcagacatttcggtaaaaaaagagtaatgattgaatccgtagatattctccatgctttttgcatttatttcaaatataagaaaaatagcaatccgtaaaagattaaatattttttgttatttttaggcaaattattccataatgagaaaattattcattccactattttcacttgctgtactggtaagctgcggaacggcaaaaaatgcagccgatgcaggagcagcccagacttcatcttcatccaaaggtgataaagcttttatgtctgcctataaggaaattaaagcagaagatctaaagaaaaacttatacgttattgcttccgatgaaatggagggcagagatacgggaagtccgggacagaaaagagcaggagaatacatggtgaattactataaaggcttgggaatttcttatcctaaagctttgggatcttactatcaaaaggttccggcagattttatgaagaaaagaggtggcggaaatcttcctgattccgaaaatattttagcctttatcgaaggatctgaaaaaccagaagaaattgtggtgatctccggtcattacgatcacgtgggaacgagaaacggagtggtttacaacggagcagacgacgacggaagcggaacggttgcggtaatggagattgcaaaagcttttcaggcagctaaaaaagcaggaaacggtccgaaaagatccattttattccttcatgtaacaggagaggaacatggtttatttggttctgaattttacacagataatccggtttttcctttggccaatacggttgtagatttaaatattgatatgatcggtcgtgatgatcctgaaaacagaggaaaacagtatgtatatgtcattggatctgaaatgctgagttctcagttaaaagtaattaatgaagcggcaaacaaaaagaccaataatcttgagttaaattataagtatgacgatccgaatgatacggaaagactgtattacagatcagatcactataattttgctaaaaataatgttcctgtagcatttttctttgacggaatccatgaagattaccacaaaccaacggatgatgtagagaaaatcgactacaatctgctggctaaaagaacccagttggttttcacaaccgcttgggaaatcgccaacagaccagacagaatcgttgttgataagaaataattgaattaaaaaatacaatataaaaggcaaattagcagatcagcggtttgcctttttagttaaattaaaatttgcatgaaaatccgtgaagctgagtggaaagatattccacagatccagatcgtaagaaattcggttaaagaaaacattttatctgatcccaatcttgtgacagatcaggattgtgaggattttctctttaacagggggaagggctgggtttgtgaagataatgacagaattttgggatttggcattgtagatatgaaagaaaagagcatttgggcgctttttgttcatcctgaatttgaaaacagaggaatcggaagaaaacttcataacaccatgctgaactggtattttgatcagacggacgagaaaatctggctgggaacttctccggatacaagagctgaaacattttacagaaaatccggatggacagaaaacggagttcacggaaagaatgaaataaaatttgaaatgggctataacgattggacaaataaataatatgaaacagaacataaaatcaatgcgtccttttataggctctgaaaactttgaaatcagcaggaatttttatcgtgatctgggatttgaagaaattgttttagagaaaaaaatgtctgtatttaaatggaatgagactgctttttatcttcaggatgcttatgtaaaagactggattgataataccatgatttttgtagaagttgaaaatacagacgaattttatcaggaacttatcagtttacatcttactgaaaaatatgagaaagtaagaattttgcctgtgagaacgatggattggggaaaagaatgttttgttcatgatccttgcggaattttgtggcatttcggagaatttttttaatcaattgtaactacgagaaaaattacattactttcatttaaaagcaattaatcaaccacaaacgaagaatgatctacgctttcgatacctattattacgacgattatgcccatacagtctgtttagcctttcaggattggaattctgaacaggaaacagaaattttcacagaaaaaacaacgattacttccgattacgaaagcggagctttttacaaaagagaattaccctgtattctcagtcttttaaataaaattcagcttcaacaagacgacatcatcattatagatggctatgtaactctggatgaagaaggaaaaataggacttggagggcatctttacgaagctttagaccaaaaatttacggtggtcggaattgcaaagaacggttttaatacaccagattcacggagaaaaacagtttatcgcggagaaagtaaaacacctttattcgtcactgcaaaaggagcagatgtagataaaataaagcaaaaagttgagcagatgcacggaaatttcagaattccgacattacttaaaaaattagatcagctttcccgaagttaaaatcatttaatttctaacgactaaatatcttttagatttttttggttgcaaatttctttaaagtgacaaatgtcattcaaatattatttttattaagtctaaataaatataaatttgtttcaataaaaaagtaaagtactaaaacacatatcaatcatatccatatcaatttttgttttttcaaccggcaaaatctatttgtcggttttttgatacagagactttcggtattcaattccccatttggcaatctcatcaataatcggctcaatggtttttccgtattctgtgatttcatattccacagttacaggttttgtgtctaaaacagtacgtttgatgagatgattgatctccatatcctgaagctcttttgaaagcattttggcagcaataccgtcaatttctcttaaaagatccataaaacgcattttttcactctgcattaaagttcccagaatatgaaacttccattttcccgataaaatttccattgaatctttgatggcattcatacggtttttgcagataggagtgatgttcaggttagcttcttttttcatgattttaaaataaattatattcctgtaaaggtaataaaaaaacagtaaggtagtttcctcgaggaaaccagtttctaaaaggaaatccattacaaaagtatgatgattaaatattagatttgtggtaacattaaaaagtgtgaaacctttatcatcacaaaaaatgataaataataaaatactaacatttgtgttcctcacggcggctttaagcagttgtaacggacaaagtgataaaagtaaaaaaatggaaaacagatctgcaaatccgctattatgcgatccggcaacaggagtttgtgaagttcccggagagaaatttgatattgggaatattgatgtaaaaactgacgaaaaatctgtaaaagttatttattttacagaccctatctgttcttcttgctggggaattgaacctcaactcagaaaactaaaactggaatacggagataatgtagatatagaatacagaatgggaggtcttcttccggactggagctataacagcggaggaataagcaaaccttcggacgtagcacatcattgggacgaagtaagcttgtattacgatatgccgattgacggagatatctggctacaggatccgctggattcttcttatccgccttctattgcctttaaagcagcacagatgcaggatagagaaaaagcactggatttcatgagagaacttcgtgaaatggtgtttttgaagaagaaaaatatcgcaaaatgggaacatattgcaacagcagcccaaaaagtaggattaaatacagatcagttgaaaaaagactttgaaggaagaggaaaagagctttttcaggaagatctgaaactggcaagagaaatgggggttcgtggatttcctacgatgttttttaccaataatgccggaaagagagagattgtttacggctcaaaaccttacgcattctacgaaactgctgttctgagagtaaattctgacaccaagaaatctgaatacttcaaaaactgggaaagtctttttgaaaaatacaattcgcttaccgcaaaagaattttcagaattatcgggaacgccgagaaaagaaagcgaaagattattaaatgagctttccgacaaaggaacgcttgaaaagcttaccaccaaaaacggttcaatctggacccttaaatcgtaattaatttcattaatatttagcaagtttttttaacaaccggaaattcattgaatttccggttttttatttttatggtgtttatgaaaaccagattacaaataaaagaatctgctctttaggagcagatccagtagataaatacatctcatttttttaattagacaacaataaaaaagcacagccgacaatgctgtgcttaaatttttataaatttaattgcgatttcagagttgaaaaaagcaaaatatgtttccacttcagttgtatttcatagtaaatgtaggaataaattttatgccaaacaatacacttaatgttaaaatttacaactgtgtgttatctttgtgttaataaatctcaaggttatttttcacgcaaaaattgttcgataaaaagatttaaagttgctttttcattgtcatttgccttatcatccatttttccatgattaatcgtggttgcctgaaccgtaatatgaaattttttttgctcttccattgtgggtaaaacgccttcatcggcgggatagtcattagagcgtaaagtatagatttttggaattgacgtttttggcagatacattctgcgattatccattgtgatgattttatatacaaaattaggatacttattggcgaaaagagccgttatatctccgccgttcgaatgtccgattaaagtaagatgtttataatcaagctccggttgtatctttttaagctcattcaaaacaaacagaatattttcttcaccacgtttccagaaaggcattcttacgatttgaggttttccttctgaaggaatgagctgatctgtaggaagttcatgttgaatactcaccacaaaataacctttagaagccatatttttcgttaagtaagaatattttaaatagtctccgcctgtattggcaccatatccatgactgaaaatgacaatctgttgttttgaaattttttctgatgtttggggactgaaataagcgaccggaattttccggtttcttgatttatcaaacatagtcagagtatctaattttacaggataaatgctgttcggatttgtattttttttcgttgaacagctcagcattatcaaagcagttaaaaataaaaagaaggaattatatttcatggtaaagttaaatgtgtgaagttgttttaaagtaagaatttttgctcctttaaaagcagaatctttgcagaaacaataaatccgtaggattgatatctatattacgataaataagctaaagatagcgttcctacgaaacaccaaacgtcatcattatatgttgtttacacagataaaactccatagagctttctgatattttattttaaataattaaagttgtttaaactaaattcagaattaaccacaaaaggcacaaaagacaatgttaaagcgaatttcattaataatcaaagcgctcaaaagaataaaaatcaaagatttttaaaaactattgtgtactttttcattgataatgatcaactttaaataaaagtttagtcatcttttgtgacttttgcggttaaataaaaagtttaaacagactcaattttaatatataaaacagagagcaattgtactctctgttttatttagttttccagcttttctttaatatacttcgctgtatgagatttcttattttttgccagttcttcgggagttccggtgaagacaacctcaccgccgtgttttcccgcttccggaccaatgtcgatgatgtaatctgctgatttaatgatatcgggttgatgttcaatcacaatcacagaatgtccaagatcaatcaaagcctgtaaagacttcagcaatttctgaatatcatggaaatgaagtcccgttgaaggttcgtcaaaaataaataacgtcttatctgttgtaaccccttttacaaggaaggatgccagttttacacgctgtgcttcaccaccggaaagggtagaagagctctgtcccaactgcaaatatcctaaacctacatcctgtaaaggttttaatttggttgcgatcttttcttccttattatctttgaaaaattccaaagcttcatccacggtcatgtgaagaatatctgaaatgtttttttcgtcgtactttacttccagaatttcgcttttgaagcgggttcctttacaaacttcacattcaagctcaatatctgccataaactgcatggaaacgttgatgacaccttctcctttacattcatcacatcttccgccatctacgttgaaggaaaaatgtttcggtttatagcccatcatttttgccactttttgcttggcgaaaagatctctgatgtcgtcataggctttaagatacgttacagggttggatcttgaagactttccgataggattctggtcgatcagttcaatatgctgaatcagttttttcggaaaatccacagcatcgtaatctccttttttaccgcccattccaagctgaatctggatatcattggtaagaatttccttcattaaagttgattttccgcttcctgaaactcccgaaattacaacaagattttccagagggacatctacatcaatattcttaagattattttgtcttgctccttttatgtgaatccattctttaccttttctccgctttttgggaacttcaatttccagtcttcccgtaagatattttgaagttaatgtatctgcatctttcagctctttgtaatctcctgcgaaaaccaattctccgccaagataacctgcttccggaccaatatcaataatataatccgctgctttcatcacgtcttcgtcatgttccacaacgattacggtgttgccaagatcacggagattctgcaaaacttcaatcaggttttctgtatctctagaatgcagtccgatggaaggttcatccagaatataaatagaacccaccaaagaacttcctaaacttgtcgcaagattaattctctggctctcaccaccggaaagtgtattggatgttctgtttaaggttaaatagcctaaaccaacttttaacaagaactccagtcgggtggtgatttcgtacaataatcttttggcaacttcctgatcgtgttcggataattttaagcttttaattaaaggaaaaagctcatccagaggaagctcgatcatcgattggatattgtgtccgtcgatttttacccagcttgtttcttcacgcagtcgcaaaccttcacaagtcgggcagagcgtttttccgcgataacgggaaagcattacacgatactgaattttatagaggttttcctcaagcattttgaagaaattatcaatcgatgggaacgtgctttttccgtctcctttccaaagatattttttctgttctttggttaactgatgataaggcttatgaatcgggaaatcttttgcttttttaatgaaatcttttttccattcgctcatgctttctcctttccatgaagcaaccgcatcttcgaaaacggacaatgttttgttgggaattacaagatcttcatcaattccgatcacttttccgtatccttcacaagtaggacacgctccgtaaggattattaaagctgaaaaaatgaacattcggttctaaaaactcgattccgtccagttcaaatttatttgaaaattcttttacttttccggtatcaacattttttaatgaacaatatccgcgaccttcatagaaagccatctgaatagagtctgccaaacgctgaagaaaactttcatcttcctcataagtaaaacggtcgataaccagattgatttccattcctttttctggggtaaagccaaaactttccagatcttcaattcctgcaacgtttccattaatttcgagccttgtaaaacctgccaatttcagaacatttaaattttctccaaaatttgcggcatcgtaatcataaggagctgttaataaaaaggaagtttctttttttgaagatttaataaaatccacgacatcggaaaccgaatctttttttacctcttcgcctgaaaccggagaataggtttttccgattcttgcgaaaagaagcttcatgtaatcgtagatctccgtagaagttcctaccgtagatctgggatttgaagaaattactttctgctgaatggcaatagaaggtgccaaacctttgatatcgtcaactttaggtttttctaattttcctaaaaactgacgtgcgtaagagcttaaactctctacatatcttcgctgtccttccgcgtaaatggtatcaaacgctaatgaagattttccgcttccggaaactcctgtaataacgatgagtttgtttttcgggataagaacatctatgtgtttcagattattaagatgtgcattcttaacgaaaatctgttttttaatatctatatctgttgtatgagccatagtaaaattaagactaacaaaattacgaatttttggcggattatggagtgatataatttttggtaattacttacgtttttacactataaagggaaaaatataaaaaaatgttaatttttctcttatgagtgaaccattactaaatagattgcatctttcataatgtaaacttaatatttactataccatgataaacactaatataaagtctgtattggaattgctgcagactttttcaacggaggaaaaatgtatcgattatctagaacagatgagatggggaggggtaatagaaagccctttcgattctgaatctcaagtatataaatgcagtaaaaatcgatataaatgtaaaaatacaggaaaatatttcaatgccaaaaccggctctatgtttgaaaattctaaaatcagtctacagaagtggtttctggcaatatggctgataacttcccacaaaaaaggaataagttctctacagcttgcaaaagatatagacgtcacccaaaaaacagcctggtttatgctgcaaagaatacgcgcctgctttggaattgaaaatcataatgaattggaaggaactgtagagtgtgatgaaactttcattggtggaaaaaataaaaacagacataaaaataaaaaagtaaaaaattcgcagggaagaaattataaagacaaagttccggtaatgggaatgttgcagagaggaggcaaaatgaatgcttttgtagtagatgataccaagaaactgagtattcagcccctgatttataaatttataattcctgaaaataccaaactaatcagtgatgaatggtggggttataacggattatgtaagacgtacgatcataaaatagtggatcactctaaaaaagaatatgtaaattctgcagacagtagtattcataccaatactattgaaggttcatggaaaattttaaaaaattctctgaacggaacttataatcatgtttctaaaaagcatcttcagaagtatgtagacgaattcgtatataaatttaatttgagggaaatatctgatggtgataaattcaggtattttcttacaaacagtgaagtgaggacgaaatataaagatttagttcaggataaaaactaatttatttactacgttatattgttttttagtttaaatatttaattatttgagtaataaataataatatatatttgaatcataaattaataatataatttttttcatttttgtagttaatggctaaagctatgtgataaaaaagttttaatttaatatagccgataatatctaataactaaaaaaatgacaccaaaacaattaaaacacaaaaatgttaaaaatataaccgataaaggaagtatctattttgatatagcagatataaaagaaaatcatccggacttaaaggttgatacagagaaaataatatcagtacatggtgtaaaagttatcaaagcgaagtatatttcagaatgtacggagtttgataagaacattaaaaatgtcttcaaaaagaaaatataaattcacatagtgtagaattgtatatacttacctaagctaataaccaccgtaataagtatttaacagtcgggtgaattttttaagtatttttaagttcaaagtattgttttttattttaaaatttgttaaaattgtaccaataaatatgtaatatagaaatgagaaagctgttcagagatcttattacacatttaatgagaaaaagataacgaaattacttcccaagatgcgatttttcagtcgcatcttttttttatgacaactatcatttgtctttcttcatgatctccagtacttttgcgctcacgaaactaactgagaataaaactgattatgattaaaagaatacttcctgtttttcttgtaggaactttctgctttacgcacgcacaggaaaaatctaccgatattgaaacaattgaggttcagggaaaacttatttcaaccccttacaaaacggcaaaccagaatattaccatcattacaagagaagaaatcatcaattctcctgcaaaaagcatcgatgaaattcttcagcaggttccgggaatggatatcagaaggagaggagccaatggagtacagagtgatatcggttttcgcggaagctctttcgagcaggttcttctgcttttaaacggaatccgtatgaacgattctcaaaccggacataactctatgaatcttcccgttgatcttgatgatgtggagagaattgaagtaataaaaggtcctgcagcaagacgattcgggcagaatgcctatgccggagtgattaatgtgatcaccaaaacgaatcccggaaaaagagtaaaaataaatgcagaaggcggagattacgaaacgtatagctttggtgtaaacgctcagcttggaaatgaaaaattctccaattctttacaggcaaattctgccggttcacagggatatatgtacaatacagattacgagatcagaaatgtattttatcaaagtaaactgaatataaaagacggtgacatcagacttcaggccggtttttctgagaaaaaattcggggcaaacggtttttatgcatcgaaagcagctacggaacagtatgaagaaacgcaggcttcaattgtaagtttggcacatcagcaaagatttggcaagatgaagctcagttcaaatgtatattggagaagagggcaggatatgtatcttttcaacagacagaagccagaaatttaccgaaatatgcacatcgggaacaatgtaggaggagaagttaattctacttacgaatggggattgggaacaacaggaataggagtagaactaaggaaagaatttctggtaagcaataatttaggagaaagaaaccgttttgtttcacaggttttctttgaacaccattttgctttactcgacaaaaaattaaacatcactccgggaatttcctgggcaaattattccaaagaaggaaactttttctatcccggtttagatgtaggatttagctttagcccaaacaataagatctacggaaatattgcaaaagttcaccgggttccctccttcacagatctgtattatgtaagcaaaacggaagttggaaatccgaatctgaaacctgaaagcgcagtttatgcagaattgggatatcagtatcagacaaaaaatattctggcaaaagtgagcggatttcttcgtgattcgggggatgcgatcgactggacaaaaattaaaccgaatgatgcggtttggtatgcacagaatataggagataccactttaaaaggaatagaagcagaactgaatcaaagattaactgaatggctgaaatatacggtcggctatacttatctggataacaaagcgaatcagtctgataattttgtagcaagatatgttctggataatttaaaacatcagtttattgcaaagctggaaacaaaattcctgaaaaactttaccaatgaagtagtttaccgttataatgaaagactgaataacggaagctacaatcttctggatgaaaaactgagttttgccaaaaaagatttttcagtgtacgttttgatcaataatttaacaaatacttcatatacagaaacttttggagttccaatgccacaaagatggttccatattggtttatcgtatactattaatattaagtaaatgttaattaatgatgaattaaagttaatattacgaaattgttaattcatttacatttgcaaaaatttttttagatgaaactatttgtgagtttgggtttacttttaggggttacattttttaaagcacaggaacatatttccagcttcaacgcactcactatcacttacaaatttcatcctaaatttttcctttatctggaaggacagtcaagaggaattgaagaatatacataccccgattactacgaaattaaaggaggattggggtataatcttaccaaaaatcataaaccttttatcggattgggaagatatgcgacttataaagatcgctctatcaacaaagaagagttccgggtatggttacaggacgtaatcgattttaaaaaaggaattgtaaagtttgaaaacagaatccgtgcagaaaaatcatggttttatgagcctcagactgacaaaaattctgaaagaatgcgttaccgttaccgtctgaatgtaagtgttcctcttaatgcaaaagaagtaaagaaaggaactgtttttgccaatgtctacgatgaggttttctttgtaagtccgatgaaaccggcttttgcaagaaacagagtgtacgttggcggtggttatcagattgataatagtgtgggagttgttgcgggatatctttggcagagagaattcaatgcttcctcaaatcagaattttcattttctgtatgttgctttaaacattaatatcgacggaaccaaacatcctgttaaaacatttgaatatcccggagcggattaagattttaaaatacagagccttccctaaattaacgtgaactcgacgctaaaatattgaattatatttagttgtccttggcatctatgcatttatccagttcgggaaatttaccgatggtttttccgggtaaaaacaataggcgcatatggcagagnnnnnnnnnnnnnnnnnnnnnnnnnnnnnnnnnnnnnnnnnnnnnnnnnnnnnnnnnnnnnnnnnnnnnnnnnnnnnnnnnnnnnnnnnnnnnnnnnnnncagattctattatatctttgtctagtacttcgtacatgggctgggaaatttaagttttttttgcaaatacaatatcttaaatctcagccttttttccaaagaaaaaagtttaaatgacttcattatatccaatcccggctaataaggcattattaatatctccagccactcctttaaggaagtttaatcctaaggagtggtttctttttaaatgtgagatacaaggttctattgctgctcttgcccggaatcttaatctggctgcttgttgcccatattttgttttctctttttttgtgggaagcaaaattgctgttccttctacttcttttactcccctaaatcctcggtctgtggctgctttcgtaggtcttgttcctccaattgattttcttacccgctcactttgtgccaatgattcttccaaggttttgctgtcgtggggattgccggaaaatctttttacggaactgatgatgcctgtttttcgactccgtactaccgccacttttgtcccaaactcgtaattctttcccgattttcctttcgcaatacaggcaacctgtggttcgtgaaggctgtaaattttatctttcgtgttgcgttcttgagtgagtactttgaggtaaattttaaaaacttcttcgtagccttttaaaacgcttaccgggagcttcctttccaattcccgaagcacccttttgccaatcgttctgagcttttttcttgccatcttagcatccttttgtcttttgggatggtgaccgaaataggcagtccgaagcaattgtttgcttactcttttgtagctttgtctttgtacaacaccttcttcttgggctattttacagcaattatcaatcaccttttttgccagtttggcatccgtaggaaaagtaatattcttttccccaacgtaggtgtctatctgaacttcatcttctcttttggctttcggatgaagggaaacactttgtcccaaaaggaattacaaacctttctccccaattctctttctaaaatgtacaaaattgctggggtcaaacggctgttcggtctgaaaaaaggtttctccggtgaaatattgccaataagcattctcaatccatcgttctacaaccctctcatcgctttctttaaacatctccttcaacaaaagcattcctgctattttgcgaatcgcaatacaaggtcttcctccctctgaaaataaattttcaaactctgactccattttatcccaagaaatctcatgggctaatattaccaacggatgctccatattaatgagctcggtaagtctggtcttgaataaatcttgctgtaaatcctgttttatttttcctaacattttgccactttctataccctaaaaataagatttattgcaatttttcacaatcattttaaccatatttttaatgcattataatgaaaatcaaaacattatcacaattttaaggaatgactaaatagattttaaaaccgaatccgtctcacaactgaggcggatttttcttggttattattttaggtttttgtgtatttatacctgaaaatcagatatttgcatatgaatttcaaatattataaccaaaatcagactgtgttatttccgtatagttttgaggagttgattcccaataatcatcctgttcggattgtcaatgatattttggagaggatcaatatagcccctcttctaaaagcctacagcaaagagggaaatcccagctatcatcccgtgatgatgctcaaggtgatggtttttgcctatatgaacaacatttattcctctcggaaaatcgaaaaagcacttcgcgaaaacatcaacttcatgtggctctccaatatgagcatcgtggatcataataccgtgaacagatttcgggctcacaagcttgaagcggcttttaaagatattttctcgcaagtggttttgcttcttgccgaagaaggtttggtaagtttgagacaggtttttgtggacggaacgaaaatcgaagcacaggcaaaccgctacacttttgtttgggcaaatgccattaaaaccaataaagaaaagatgcttcggcagctggaggaactctggaaatatgcccaaagcgtggcaagggaagaggacaaagaccctgaaccaccggagtttaaagaaatcagcaaagaaaaaattcagcaaacggtagaaaatatcaatgccaaattgaaaggcagcaacggtaaaaccgattccgacaagaaagccaaagccaagctgaattacattaaaaacaattttgagaaaaatctcggtaaatacgaagttcaggaagcggttttggcagagaggaattcctatagcaagactgatgaagacgccacttttatgagaatgaaggatgaccatatgatgaacggacagctcaaacctgcttataatgcgcagatttctaccgagaatcagtttattgtaaattacacaattcatcaagagaccaacgacttcaatactctggagcgtcatttggaaaatttcaaaaaactgtatggagaaaaaagattggctaaattagaagaactcactgccgatgcgggttacggaagcgagcagaactatgaattactggaacaaaaccaaatcactccatttgtaaagtacaacaccttcgataaagagcaggatgcccattatcaggcgaaacacaaaacattcagcaaaggaaatctgcattataataaggaagaagatttttatgtttgtccgatgggacagaagatggagaaaactcacgaaagcacccggaaaaccaagaccggttacccgcaaaagctatcgcattatcaagcaaaaaattgtgatggatgcccaattagaggcgtttgccacagttcaaaagaaaaccggagcattgagcgaaaccatcatctggaggattacaaagaaaaaatccgggaacttttaaaaagcgaagaaggcattaaaaaacgcaaacaacgttcggttgaagtagaacctgtgtttgcccacctcaaacattgcaataattttaagcgctttacacttaaaggtttgaaaaaggtagaattggagttcggattacatgctttagcccataatttaagaaagaaggttgcttgatgatgacaactttttcttttccaaaggatgccggaatttaatgaaaataaaaatccgcctcacttggtggttgtgagacggattcttttatttcgggctattaaaccattttttcaaaatctgtgcctgcgtaagttcttaagctggtaaatttaatgcaggttataatttaaagtagatattaaaatttgcaataaaataaagctgttgatcgctttcagccaaaatctgtttgtcccggttcgcctgaagcgacgtttcgtaaaatttaaatttaaccagttcacgcatcatttaaaacttacttgataattggattttcgtgaaaactttcttcgtatacaatgggaaatcagcgttttgaagccatccgtaatagcccagatctttctggaatacagactttaccgtttgtcccttatattttccgaaagcaaaaatttcctgtccgttttcgttgaaatgaatcattccggcaagatctgcgaatttattctgagacgaaaaattgcttaattctgcaatttcgttcggtacatcatcgtattttccgacctgcgcatcaagcacttcaaaagttgccataacatcagcttccgcagaatgggcgttttccagtgtttttccgcaataaaactgataggcagcacctaaatttcggggttcttttttaaagaaaatggtctgtgcatcaaccagtttgaatttattcaaatcaaaatcaaactcggcacgaagcagctcttccgctaacaatggaacatcgaatctgttggaattgaaacctcccaaatccgcacccgtaatcatttccattactttcggagcaatttctttaaaggttggcgcatcttttacgtcttcatcataaataccgtggatttcgctgcattctttcgggatcggcatttcaggatttaccctccatgttttgctttctctcgacgaatcaggatttacttttaaaatacagatttcaacaatacggtctttcccgatattggttcctgtagtttccagatcaaaaatgcaaagcggtttatgtagttttaaattcattttttataatttgaaaatttgataatgtgttaatttgaaaatggatttaaacgtccattactcaacacataaatttattttagttgtttttgaaatataattgagattaaaatataataaagaattaccatcggaattccgacagatctaaatatgattaaaataataacagaaccgaccagtaaggctattttcggataattatcctgtagtttcatcgatttgaatttcatggcgatcatttttatcggggagattaaaagccatgaagaaatagccgtcagaataagaagataaatttgattttcaaataaaaattcaaaggttcccaattctttattagcataaaataatccgaaaattaaaattgtgtttgatggggtatttaatcctttaaaataatatttttgttcttcatcaagattaaaaatcgccagtctaagacaggaaaataaagtgattaaaaaaccaagataagttacccattgaggtccattgtagagtaaatgtgtataatttatggcttccaagggatttctatgatctattccgagtaatgatacaacaatcgtcagtcccggaaccagtccgaagctcaccatatctgccaaagaatccagttgtgtcccgagattggaattcgcctttaacgctcttgccgtaaaaccatcaaagaaatccagaatcagagaaagcatgatacagatggcagtcgtctgataatctcctgaaataagatgaatggcgccgatacatccggaaagcagatttcctaaggtaatggcattggcaagattatttttaataaaattcataggcacaaaattaataaattaaagtaacaaagcgttaattaaacggagcatcaattatagcagtgtgttacacggttgcagggagatattattaaattaattcgaatttagtgtaaatttgcagcatgaaattgtttaaagaatttagaaaacaggaagttctggtgcttttgtacagaatttttttagcctattttttctatcagatcgcaagatttttattctggtactttaataaagacttaataaagatcgattctgtttcagattatttcagtttgtcttttcatgggattgcgttcgatacaacggcgattttatatgtaaatgccctttttattcttctgagcatcattccggtcatcatcaatactaaaaaaagttatcagacatttcttttctggctgtattttgtcaccaacggaattgcttatgcaatgaatttcggagatatggtgtatttcaggttttcgcagatgaggcttacctctgccgcgttgcaggttgcgcagcatgaaagcaatatttttaaggtctttacgacttccgttgctcagaatccttttgttttgatcggatttgttggtttaatgatcctttggatttttctttataaaaaagtaaagattcaggaaaacaaaccagaaaaactggttccgtattttgtttggtctttgttaacgctttgcataacggctgttttggctgttggcgggatccgtggagattttaaacacagcacaagaccgatcaatctggtagacgccaatcgtttcgtaaaaattccggcacagggaaatgtcgttttgaacagtacgttttcctttttccgaactctaaatacgaataattttaaggaagttcattttgtagatgaaaaatttatcgatcagaatatccatccttataaagaatataacagagaagtcgcagaaaaaccaaatattgttatttttattgtagaatccttcggaagagagtattcaggggcattcaataaagataaaaacatcaaagattacgtttcttacactccgtttatcgacagtttggcgggacagagtcttatttttccgaacacttttgccaacggaagacagtcgattcacgggatgagttccgttcttgccggaattccgagtttaacggacgcttttacaagttcgccgtattccaaccagaaaatccagtccattgtttctgtctgcaacgaaatgggatacgatacttctttctatcacggcgctccgaatggttccatgggatttttgggctttggaaacatcttaggcttcaaacactattttggaaagacagaatacaataacgataaagatttcgacggaatatgggcaatctgggatgaaccttttttacagtattttgcgaaaaatgcagggaaaaagcagcctttcatggcaaccgtattcacggcatcttcacatcatccgtttaaaatccctgagaaacacaacggaaaatttaaaaaaggaaaaattcagatgcatgaaccaattcaatatacggattatgcgatcagaaagtattttgaaacggctaaaaaacagccttggttcaataataccatctttgtttttacgggagatcataccaacgaaatttattatcccgaatacgataaaacaatgaatcgtttcgcagtgcctttaatcttttattcaccaaatcctgcatacaatttaaaaggcgtaaatcctgaactggcacagcagattgatatttatcctacgcttgcagatttaataggttaccataaaaaaatcagaagttgggggagaagtctggtgagcgaaagacagtattcgccgattattgccaattcagacggaaccgtggagcagtttatcatcgggaattacatctaccgttttgatggaaaagaaattgtggggatctttgataagtctgatttaggattggaaaaaaatctcatggagcaattgagatctgatccggaagcgcaaaaaggaaaacaaatagcaaaagcatggtatcaggattatatggatcgggtgataaacagaaaaatgaaataaagtataaccgtttgatcttcaggaataattgaatgaaattttaaattgttaaacctattaatttattattgtttcagatgaatttttggtatatctcttgtaatctatgtgtaggataataaatttttttgttgttttaaaataaatttatatttttagcaataatagacaacgaaattattttattgaaattaaaactataagaaatatgagaaaattattgttaaccttcgcactttcattattcggagtaatgtcttttgcacagattgaaggaaaatggaaaaccatagacgatgaaacaaaacaggctaaatctattgttgagatctataaaaaaggagaccagtactttggcaaaatctcacaattattaataaagccagctaatccaaactgtacagcttgtaaagacgacagaaaaaacaaacctattctgggaatggaaatcatcagagggcttaaaaaagacggtgatgaatttacaggaggaaccattaccgatcctaaaacaggaaaaacctacaaatgtacgattacaagaagcggtgataacctgaatgtaagaggatatgttggtttatctttcatcggaagatcacagacttggcagaaagctaattaatcgggatcaaataaaaattaataagcggcatttcattaaatgaaatgtcgtttttgttatgtaaataataaaaaaacactacttttgtactctaaatttttcaaataaatatggcagaatatacttttcgtgaggtaattgcacaggcaatgagcgaggaaatgcgtaaagacgaatccatctatttaatgggggaggaagttgcagaatataatggtgcatataaggcttcaaaaggaatgctggatgaatttggtgctaaaagagtaatcgatacaccaattgctgagcttggtttcgcagggatttctgtgggagctgcaatgaatggtaacagaccgattgtagaatttatgaccttcaatttctctttggtggggattgatcagattatcaataacgctgcaaaaatccgccagatgagtggaggacaatggaactgcccaatcgttttccgtggtcctacagcttctgcaggtcagttgggagcaacacactctcaggctttcgaaagctggtatgccaactgtccgggattaaaagtagtagttccttcaaacccttatgatgcgaaaggattattgaaaacagcgattcaggataatgatccggtaattttcatggaatctgagcagatgtatggagacaaaatggaaattcctgaagaagaatactatttacctatcgggaaagcagatatcaaaagagaaggttctgatgttacgctggtttctttcggaaaaatcatgaagctggctattcaggctgctgaagatttggctaaagaaggtatttctgtagaagttattgatcttagaaccgttcgtcctttggattacgatactgttttggcgtccgttaaaaagaccaacagactggttgttttagaagaagcgtggccatttggttcagttgcgtctgaaatcacctatatggttcagcagaaagcattcgattatctggatgctccaattaagagaattacaactccagatgctcctgctccttactccgcagctttatttgcagagtggttcccgaaacttgaaaaagtgaaagaagagatcaaaaaagcaatgtacgttaagtaataagacgattatagaaaaaaacttccgaaaggaagttttttcatttattatattcatgaagaaaaattcatggggatgtaaatttggcttaaatttgcgcgtttaaaaattaaattagctggtatggcagaagttacagaaggcggtcatcattttgacatcaaaaagctttctttcattggaattttagtgtctctcggaattgttttcggagatatcggtacttcaccgctttatgtaatgaaagcgattgttaacgctagaggggaaggaagtacgatgcctttcaatgagtacatcgaaggggcgttgtcctgtattatctggacgcttactcttcagacaacaataaaatatgtaatcattgctcttagagcagacaacaaaggagaaggaggaattttggcacttttctctctcgtaaaaaatcttaaaaaaggctggctgtatcttattgctattgtaggagctgccgcacttattgccgacggagtaattaccccttcgcttacggtaatgtctgcaattgaaggtcttgaaatttataacccgcatactccggttgttcctatcacgatcgcgattcttattgttattttcgtagttcagcagtttggtacgagctttatcgggaagttcttcggaccggtaatggtgatctggtttctggttttgggaggtttaggattatctcatttaagcgagaatcttgaaattttaagatctttcaatccgtattacgcatataagcttattgtcaattctccgagcgcaattgtaattttaggagcggttttcctttgtacaaccggagcggaagcactttattccgacttaggacactgcggtgccaaaaatatccgtgtaagctggggatttgtaaaagtgatgttaatcttgaattatcttggacagggagcgtggcttttaaccaattacggtaaaccgggattttcggtagtaaaccctttctttggtatcatggaagaatggatggtggttccgggcgttattttggcaactgcggctgcaattattgccagtcaggctttgataacaggatcatttaccattttctctgaagcaatgtccctaaatttatggcctaaccaaaaaatcgattatccttccggggttaaaggacaaatgtacattccaagaattaactgggggcttttactgttctgtattgtggtggttcttcacttcaaagaatcaggaaaaatggaagcggcttacggtttatccattacggtaaccatgttgatgaccacgattcttttggtatactggctgttgaaacaaagagtcaacaaagttttaatccttgtttttgcgtttgtttatatggcaatcgaattaggtttctttagtgcaaacgtaatcaaattcatggaaggaggatggattacagtcgtattggctggatctataggaatctgtatgtatgcatggtacaacggaagatctattaaaacaaaattcatcaaatttattaagcttgagacctatattccgatcattaaagacatgaagcttgatgaaacgattcctaaatatgcaactaacttggcgtacttaagccgtgcgaagagaaatgatgagatcgaatcgaagattatttattcaatcatcaaaaaacagccgaaaagagccgatcattattttattctaagcattaccaatcaggaagatccgtataccttcaaatatgcggtagacgaagttcttccgggaacgatctataagattaacttcatgttaggatttaagatagaccgaaggattaacgattatttcgatatggttctcagagatttaatggcagacggaacaattccttcaagaagcagccatccgtcattaagagcgcataatattccgccggatctgaaatacgtgattatagacaatacctatatcaacgatattcttcttacggttaaagaaaaaatcattcttaatatttataatttcgtgaaatatatcggaagcgacgactttaaagcatggggaatcacctctcacaacgttgtggtagaatctgcacctatgacggaagactgcgtcggaaaatccaaaatcgagcagtgcgaatttatccgccacaaaggttaaattctttaacacagtaggacaatttgtatttaaataaaaatcaataaatttgtagataaattttttgatggatacgatacaaaaagaaaaaaatattgcgctgataaaggatgttttaagaaactatttattggaaaaaggtttccgaaacactcctgaacgatatacaatactcgaagaaatatacggtatggatcatcacttcaatgtggatgatctgtaccttttaatgttgcagaaaaaataccacgtttccaaagcaacaatttacaatacaattgaaattttccttgatgcaggactcatccgtaagcatcagttcggagaaaaaacactcacttcttcctcttacgaaaaatcttattttgataaacagcacgatcatttagtcgtgtacaaaaaagattcagataaggaaatcgaagagatcatcgagttttgtgatccgagaattcaagggattaaagaagcaattgaacaggcatttggcgtaaaaattgattcccattcgctgtatttttatggcacaaagaatgattaatcaattcatgagactatttgctttagtcctagtctctgtttcaacgtttttatttgcacagaaccagccgaaaactctgcaaaaagatccttattttaccaatacaactcctcaaaagaacgctccgcctgctgaaaaggtgaagcacatccattctgatgaattaagaaaggacgagaaatacgatgggaataattatttcgtggggaatgtacagttttcgcatcagggttctttgctgaatgcggatcttgtgattgtgtatgaagaacagaatttcattaaagcaatcgggaatgtaaaactgcagaacgccgatggttcagtaattacagccgatgaaatggagtatgacggaaatacacaaaaaggaattgcccgaaaaaatgtagttcttaccgacccgaaaggaacggtgataaaaacggaaaccatgtattatgataggctttccaatcaggcgtattacaacaccggaggaacaattaacgacggaaaaagtacaacgtattccaaaacagcaacctattttcttacaaccagaacgatcgatctttccggaagagtgaaaatagaagatgctcagtacattctggaaggagataatgtagttcagaaccagaatacaaacatcgtaaacatcaacggaccgacgacaattgtcaacaagaaaaatcctaaaaaccgaatcgttaccgataaaggaaattacaatacgaatacgaaagaagcttttttatacaaaaattccagagtgtattacaatgataaaatccttaccggagacgaaatgtactataaccagttatccggtttcggaaaagcaacaggaaatgtaacgctggatgatccgaacgaaagaagatttataaaaggcggttacggagaaatttacgaaaagaaagattctgccatgatgaccaaaaatccgtatgcagtaaaagctctggaaaaagattcgatgtattttgcggcagaaaaaattatttcttttcaaaaaccggatcctgaagatatcaaggtgaagaaaagttttcttagagcatacagaaaaggtcgattctacaaatccaatgcgcagggaagagcagattctattgctttcaatgaaacggatggagttcttcatatgtataccaatccaatcctttggagcaacggaaaacaggtaaccggagataaagttgaagcctatttcaatacccaaaaagaaaatatagattctctgaaggttctcggaaatgcttttgccatcagtaaagtcgattctctgaatatgaaagatgaattcaatcaggtgaaaggtaaactcatgacggtttattacggagaagataacaacatcaaagaagcaaaagtaatcggaaatgcacaggcaattacctattccgacgatgtgaacgagcaaacgaaggaaaaggaaagaatcgggatttctcttacttcctgcggtattattgatgctatttttgaggaaaagatgttgtatgttgttgcctgtaatatcggagcggcatcagatacctatcctatgagtatgatagaacccgaaaggcggaaatttccggatttcaactggaatacaaaagacaggattctgaaatggcaggatattctcgtggatacgcctaattatgaagaagtaaaatacgaagccgacaatacactttataataaagcacaggaagcagtggaaaaagaaaaagccaaagaagaagccaaaaagccgaaacgtgtaaggcgataaattcgcatttttttaacagaattttttttaattataaaatattcaccattttctaaataggaaatggtgatttatttttacaaaatcgccctgaaaatagcggctgcctgataattttttaattttttttcaaattttcaggcgtgttttattcaaaaatctgtgaagcggaaaaccttactactattcggtttgtcaattgttgaattgtcattatatattgaattgagttattatgttggtattaaatgtaaatattttttaaagaatgtgtatttcgattcatttttttctatatatttacctaagaatatatgaaactatattaatattttgtgatttggtggtattgcccgcagttttctgcgggcaatttttttattctgtccgtttcatttcggagtttgccgaatcttttatagttttgctaaaatttcggaaaatggaaatgcaaaaggatttttttatatatcaggctcagacgacaaaatttgcagctggttttgaagtagagaaggcggaaggaagttatatttatggtaaagacggaagaagatatctggattttgtagcaggagtttctgccaatactttaggacattctcatccaaaagttgtagatgcaataaaagagcaggcagaaaaataccttcacgtgatggtttatggagaatatgctcaggaaaaaccagtcgctttatgtaaattattggcggaagctactccagatccgttagaaattacttatctcgtaaacagcggcgcagaagcgatcgacggaagtctgaaactggcaaaaagatatactggaagagaagagattgtctcttttaaaaactcttatcacggaaatacacatggtgcgctaagtgtatcaggaaacgaatttcataagagagaatttcgtccgttattaccaatgatttcgttcatagaatttaacaatgaaaaagattttgataaaattaccgagaaaacagcttgtgtaattttagaaaccattcagggagcggcaggatttttagttcctaatgatgattatttaattaaactaaaaaagagatgtgaagaagtcggcgcattattaattttagatgaaattcagccgggattcggaagaacgggaaaacttttttcttttgaacatttcggcattgttccggatattcttgtgatgggaaaaggaatgggaggaggagttcctgttggtgcttttatgagttcgcgcaaaattatggaaacactgtctcattctccgaaattagggcacatcacaactttcggtggaaatccgcttattgcggcttccagttatgcaactttgaaagaagttctggaaagcggtctgatgaatgaagtagaagaaaaagaaaaactatacaggaaccttttggttcatccaaaaataaaaaacattaacggaaaagggcttatgttggctgtaaatctaggctctcctgaatatactttagacgttgccaaaagatgcatggaaaaaggactgattgtattttggcagctttacagaaatgaatatctgagaatttctccgccacttacgatttcaaaggaagaaatagaagaaggatgtaaaattatccttgacgtactaaatgaaaaccaataaaaaagctttttttcagagcttttttttgataccacaaaacaaaatgattatggtaaaataataattaaacacctatttaagaatctctgacaaatatcatgaagattatgcaaaaaaataaatacatttttgtgtaataaaaaaattaatttatatattgcggaacgattaaaacaaagattatatggcgaaacataaagtccattacgaattcccaatgcattgtttatcagagattttgtatgaatatctggcaacagcggaaggattgtctgaatggtttgcagatgatgtgacagagaaaggggatgacttctttttcagctggggtggaggtccttctgagaaggctactttaataagatataagcctgaaggtttcgtccgtttcagatgggaggaagacgaaggaaccaaaaatttctttgaaatgacgatcaccattgatgatattacagaagacctgtctcttaatattacagatttctgtgaagaaggagatgaggaagaaaacgcaatgtactgggaaaatcttatcgaaaatcttagaattaaattaggggcagcctaaacgtaggcaagctgaattataaaactgatgaacgatttatcgttcattatttttttgtaaataaattagattacagtggaaaatcaatattttacatcagacgaaattaatgtaaaaaacagagcctttctttcgggggatgccgttaaagtttcttttttcatcagaaacggaaaattaatcatggatgaagaatgctatttcttcctaatggcttccatgagaaaaatgagactgaatattccgttaacctacactctggaattttttcagtcattatttcaaaaagaaattattgaaggagaaaacattcagaatgccgtcattaattttcaggttttcagaaattcagacggattaactctttccaaatcctcagtttcttatttttatgaaattacagagaccgaagatgttttagcattgcaggaaagacatcttgagcttgatttaattaaggaaataaacgttaataataaccttttaagcagcatcagagtccacagcccggaaaatatttacggagagatttatgcgcaggaaaatgatcttgatgatgttatccttttaaacccgaataaaaggattgcgcgtacaactttcggaaatcttctgtttttggaaggtgacgtgatcaaaattccgaaacagacggaaggagcttacatttcgccgcttatggagaattttgtaaccttcttgcataaaaataatcttgcagatatacaggaacatgagatcattgcttttgaatctcagaaagcagaagaaattttattgatttcagatgaaaaaggggtgttttctgttggtaaaattagaaataaaacttttggaaatcagcggttctcagaactcataaaaagctggaaagaaagcttttagcgtaaaattgacaaacccggtaaacaacaaagttccgaaagtcctttaccgggttttattctgaatgaatcagaatttgtatctttatttagtattctctgaaaatttctgaaaatttctgagcaatttctctcttacctttttcgctggtaagatattctctgtcttttgtattattgatatatccgagttccattaaaacggtcggagctttagattctcttaaaatatgaagatttttctcttcaatttttaacgtgttgaatttctttgaaatccggtcagcaagcttttttgaaccgtcggtattctgcgtgtagagttcggctccctgttcagtagattcagattttggactgctgtttacgtgaagtgaaataaccatttcgggattcagcttattgataagagctgttctgtctgatagctggctgtaggtatcattacttctcgttaaaataacctcgtattgatcctgagtatcattgaatttttgaatctcttttccgatgttcagaacaatatccttttcataaattccgtatctgttggctcccatatcatttccgccgtgtcctgcgtcaataatgatgacttttttatgaattggtgtgaaagatagaaatgcagtggaaaaaacggagagaataaatagttttgttcctttcatatcgtaaagattttagttaaacaaataacgtaaattctttgcttaaaattggttaacgctttcttaaagtttgttaaatattaacggaatgttaataatgggatgtttctaattcagggaaatatcttcaggagaatttgcccataaaagatattctccacccagattctgcatgatcgatttccaaagcgtctgatcattgggtaaagtataatcaaggttataaacatctactaccgtccagagttttctctggatttccccatcaagctgcaaagctgtccatccggaatagccggaaaatattttcacgttattgatgtccagttcaccgttcagaacagaactgatgatgttttcaatgtcttccgtaagataaaattcgggggtgatttctgtataaatttcggttactttttttccttttacaatgaagaaaactttgtcgttttccacaggaccgccatcataaacttcaatcttaaaatcaaaaaaatctttgaatttactgctcatctgactgttttttttatttaatattaaaccaaatgcaccgttctcattatgttcaataatcaaaacaacagatctggaaaaaatatcgccggaaatgtcgggtgtggaaattaatattttacctttgtaagagtaattcatactcaaatttaataaaaaatatttatggaaaacctgcacgacaaaagaaaagtgtacgagaaatcccaacttattgaaagtgagataaaacaaaatcctatcgaacagtttcgcgactggtttctggaagccagcgaaaatcctaacatctcggaagccaatgcaatggctatttccacggtagaagaagatggctgtccgcgtacaagaatggtgttgttaaaagcgtatacacatgaaggatttattttttatacgaattatgacagcagaaaaggaaaatccatagaaaagacccataaagcctgtcttcatttcttttggccgagtcttgaaaagcagatcattattaaagcagatctggaacgcatcgcagaaaacctgagtgacggatattttcattccagaccgaaaggaagtcagttaggcgcagtggtttctcctcaaagtcaagaaattcccaaccgtgaatttttagaaaaaaagcttaaagagcttgaagaaaagtatgaaaatgcagaagttccaagacctgaaaactggggcggttatattgcaaaaccttacgaaatagaattctggcagggaagacctaaccggcttcacgatagaattgtatatgaattggttgatggtctcgattggaaaatagcaagattagctccttaaatagctgatacatcaataataagaaaacctcatcacacgatgaggttttattttttctttaatcagaatgattattttttctttttacttggagcaggagcgttagctgaagcaacagcagcagaaagatctgcacctgctttgaatttagcaacagttttagcttcgatgttaattggctttttagttgcaggattaatcccctgtcttgctgctctttcagctacagagaaagttccaaaccctactaaagaaacttttccgtcttttttctttagagtagtcattacattagaaataaatgattctaaagcagctttagctgcaactttagtgatgccggcatcttttgcgattgcgtcgattaattcagacttgttcataatttttaatattaaagttagttcgtattaatagcaaatataatactattttctatatgtgcaatttttttgcaaaaaaataaataaattttttgattttacgtgaaaacagttaaaatatgataattcagctttttacgaaaaatctacgttacacgttactaaaatcatgccaaatgcttatgtatattgactttactaaaaatgtaatattattttttacatttattaaatcctgaattttgtaataagtattgatcgtttttaggatatgtttgtaaattctgtaaataaaatcttcaaaaattatgtttaattaaattaaagtactggcattctgtgagttttaaattcattataaaaggcggttttgtaaattattattaataaatttgcaccatgttaatagaagtttttaagtctaagattcacagggtgagagttacggcttctgaccttaattatattggaagtattacaatagatgaagaccttattgaagcggctggtttggtagtaggagaaagggtttatattgtaaatgtgaataacggagagcgtttcgacacttacgtgatcaaaggaaaaagaaaatcgggagaagtttgtcttaacggtcctgcagcgagaaaagtacagagagatgatatcattattatcattgcttatgcacagatgactccggaagaagcacagactttccagccaaaaattgttttcccggacgaaaaaacaaaccttttgacgtaaccggatggagaaaaaatcaaaaaatcctctgaaatccattcttacaatagtgatctcgcttgcttttgcaggcttttttttatggtttgccctaaaaggtctggattttaaagtgatccagaaatctttatcaaaggcaaattattggtgggttctgttcgcggcttgttttggtattgcagcatactggtttcgggcaatccgctggaatctgatgctggaaccgatgggacaccaaatttcaaactccaattctctatggtcgatttcttttggatatcttatgaatcttaccatcccgagaagcggggaagtagcaagagcaactgctttgtacggagtggaaagaattccggtagaccagtctttcggaaccattattctggaaagagtagtagacttagtctgtatgctttgctttttagggttgactttgatctttaaaggagatgttatttcatctgtttatgaaagttcgggagccgatttcaatccgaataaaatctttttcatcataggagttttattgctgggtgcggttttattttttatgttcaaaaaaagactcgccaatgttcctgttttagataagattatcaaatttatagatggaatactcgacggtttaacatctgtattcaaattaaagcaaaaaggaaaattcattctttatactttaggaatctgggtttcctattattttgccgcctatttggtctgttttgcgctgccggaaacttccgacttcacttttgatgacggatttctaattcttgtagtgggaacattcggaatgattattcccgcaagtggaggaatcggagcttttaatcttgcaatgaagtacggttttatggctttatttatatccatggggaaaagcggtgagcttggaggagaagtcggattaacgtattctttcatttcactgcctctgcagatctgcatcatgttggtcatgggattaatctctattccgatgctggcaaaagcgagaaataaaattgttgcagaaaaagaatttgcagaataatttatcttttaattcaatcttttgaaaatataaaatccggtcttggtgatcggatttttttgcttttcattttgctgaatttcaaaattttatgttttgcaatttacataattttttgtcacaaaatattttggaaatttcctaaaaccgccataacttcgataaacaatacataaaacacatagcattattatggcaattaatttacagaaagggcaaagaattgatcttggatttacaaaaatgaccatcggtctcggatgggatccgaatgaaggaatgggatatgattttgaccttgatgcctccgcaattatgatcgacgcggaacgaaaactggtgagtgaagaatattttgttttttataataacctgagttcgcccgatggcgcactcacgcatacaggtgatgacccgagcggaaaaaacagcgatggagatgatgatgaatccatcattattgatcttgaaaaagtagatgaaagagtgcaggaaattctctttgtcgttaccatcgaagattttgaaaggagaaagcagaatttcggacaggtgagaaattcgtacatcagaattgtagacaataacacgaatatggaaattgccaaatatgaactggacgaagacttctccatcgaaaccggaatagaattcgggagactgtacaaacgtggcggaagctggaagtttgaagcttcaggaatcggctacagagcagatctgggtttctttcttgaaaaatattacaaaggacaaatcattaaatagatatggcaatcaacttacaaaaaggtcagacgattaacctccgcaaaaatgaacatggagaagatgcgtatgatctttcctctgtaaccataggtctgggttgggatgttcgaagatccggaaattttttcaaccgtctgttcgggatcagcgacggtccggaatatgatcttgatgccatcgcttttcttctggataaaaacggaaaagtggcggatctcggaatgacgattcccggaagaaacggaagagagatcgctttgtataaaagtgatgttatctactttaatgcaatgcggcatccgagcggaaaaatatggctcaccggagataacagaaccggagccggagatggcgacgacgaacagattattgtgttgctggatcagttggatgaacgttatcagaaaatcgttttcgtggtttcaatttatcagggattgtttaacaggcagcatttcggaatgatagaaaatgcatttatccgcgcggtagatgcaagaggaagagaaattacaaaattcagtctttccggcgatgcagatatgaacggaatgtgttctatggtttttgcagaagtttaccgccacaacggcgactggaaattccgtgccatcggagaaccgcaccagacggataattttattgaggttcttgttccttacacctataagtaaaaaagtatgctgaaaatgcatacttttttatttcaatccgattttcagtcccatttcctttttcatatacagtaaaacttctgcatttcctcgtgcatcatcaaccggatgatgggtgtgttctgtttttcgtaaatgtttccactgggcaaaagtgtctttttccagtccgcaatacagatccgcaagtcttctggaggaaaaaccgaatggatttctcccgatgaaatggtgaaaataccaacagataaacatccagtcgaagccgttgttatcactgatgaaaacaggtcttcctttagaattttctttaatccattcttcaaatttcagcatcacttcttcgggatcatcaaaattcattgtttcttcccgagtgaaaccggaaactgccaatgcatccggattgaatttctctgaaataggtttcagttttccgtaaaaggtggtttccagattttcatccactaaaacggctccgaaacagaccattgaaaaatctccgggaatcggtccgtctgattctatatcgaccataatgtagctcatgcaattgtattttaaattttaaagaaacgaatatatagaaaattgccttcggaaattaaatatttacaaaagttcaaaaaaacttcttttgccgatcttaatttttattcctttctctaatttaatttcttcattcggatcagttatttttatattgttgatctgaattccaccgttttcaatcagtcttcggatgaaagatttactttcgttactcttcagttgatggcataattctgttaaagtcattttatgctgaatatgatggagcgaatccatgaataccggttcaaaagctttttctttaaaatttttactctggaactgattaatgaaaaataactcggcgttttcagcagattctgcatcatgatattgtgtgatgatattttttgcgatcagctttttaatattcattggattttcaccgtttacgatattttgctttaaacttttcttctcttcagaagaaaaatccgtggtaagatcaataaattcgtcaatcagagaatccgggatggacatcgttttcccgaacatttcattcggctcgtcggttaatccgataatgttgtttaaagatttgctcattttttcttttccgtcaagccctttcagcaaaggcatacacatcacgatctgcggagatttttcgtgactttcctgcaattgtcgccccatcgtacagttgaaaagctggtcggttccgcccatttcaatgtcacaattaatctgtacagaatcaaaaccctgcaaaatagggtatacaagttcatgcatggcaatcggtgtattttctgaaaaccttttattgaaatcatttctgtgcatcagttgcgcaaccgtcactttcgacattagttggatcacttccgaaaaattcagcgcatccagccattccgaattaaagacaatgtttgttttttccacatcaataactttggagagctgactgatgtacgtttctgcattatgatgaacttcttcagcggttaaaggttttctcgccttgttttttcctgtaggatcgccgattcttgccgtaaaacttccgacaatgattacaatctggtgtcccagatcctgaaactgtttcagttttttcaaaacaactgcgtgtccaagatgcagatccggagcagtgggatcaaaaccaagtttgataattaattttctgttttctttttctgcctgctgaattttttcttccagtccgttttccggcagaataatttctgcattttcttttaatttcctgatcattttttaatttttaagcatgaaaaaacccgaacaaaactgtccgggttctatgatatttttagattaaatttctactgaatatggttatagaagtcttcccgaacggttatccgggtaataataattgctgaaaaaaggaagacgcaataggttgtttaagtgcttcatgagtgcaaatatagaatttttattaaaaaatcatttgttttttcttcagaaaatcttcaacttttctttcaaagtcatggaaattctgtacaagaaagtaaccgcttcttttctctgaaaactctttatcattaagcagcaaaaaactctttttcagttgaaggtaacaaagtaaaacaaattgttttattttaacttcgaactgagtttccagtttaaaattcaactgttctccgtaagattcttcaaaataatatatagaaataatggctttatgctgtttatcctttattcgttttatttcaaatttacatcctcccggttcgttgtaccagataaattcagtttcccatttgtcttgtatcagatccagaacggcatacatgatttctgaataaggattgttaaaaacatgagtaattacataattaaaacttcttccatgaatgtaaagcagaaattcactccatccggaaggaagaaggattaaaagaatatccaattcatcagattgtattattttttggttatttctcattcaaattattaagagtttttaaagcttcatgataaaacctttataaaacttggtgcagtcatatagtttttcaaagtcaggaaagttgttttcgtgggaaaaatctttattttttacctgaaattcctgttcagcaaaagaatacagatctttatgatttaattgtaaataatccgacaggtaattttcatttttctgatgtactaatcctgtaaaaaatattccatagatcagaaaacggttgaaatcttccgctttgcatttgtaccctaaatgttgcattgaatatttttcgtaatctgaaagaatttggttaaacttttcaacttgttcagcatcatgtatttcataaaaaatatcaaatccgtgtacgaaaagctgggttttcatttcttccggatcggaaatgtattttgatgcaaaccaattgaaaatatcttccacttcttctttattaagactttctgcattctcctgaactttctttttaataagctctaaacttgttttctgatctttttttaaaaactgaagcgcagtttcttcttcgcggcagagtttgttgtacagattgatctttgcggcaacaggatttgttttgatgaaataaagtttttctgccataatcttatgtattgccttatttttcagcaaatttcataactaaggtagtgaaaaatttcacataaaaaagcagagtggtattatttcatacactctgccgatgatttattatttactgaaagcagtcagccgttttagttcatcctttaaaatcacatcttcgatggcttttttaatcatgctgcgaactatggaaagcggatgatggggaaaatcattgtcatactcctctgtttcggatttattcataagagcgccctctttaaaggaaggatcgtagggatcttcaaaccagtttttcagtccattatcatcgaaagtaacttcgccgttttggagaaatctgtttagtaccagattatccctcatccctgttgttccgacttcaacagcttgggttttaattacaaaactgcagttttcaaaaggaatagtaacggatgcaagatagctcatcccttgttcaggttgagggattttaaaaatagtctttacactcggaatattatgaaggttaaatattgatacctcaacaatgcctccaccggaagcagaaactgagtgcctgtgaaaatttcttaattcatcaatattcttaacagtcggtaaatctcgcggaatgttgaaaaagtacagagaaatcaatgcgctttgttcaggatttacccagacgatctgggagtcattttgctcaacgatttcccagccgaaagttgggatagaaatagaatttatggtaacttcaggcttttttcttttaaggaaagtaaacatagttatcttgtttttgtttttaaagtttctgatgtgccgttttaaggaattttatcagttcggcaagtccgttttgggaaaactgtatttcattttggctgtagaatgtagcaggcaatttcagataatattcccatgtttttacatctgcatggtagttgcttcctgtttcaataccgctttttgtggtgtatttgtatttggtgtcgttttcaggtttggaagatgagttctgctgaattttttcaagcgcattaatgagtttttcgacttcatctttttccagagtaatggtctttctggaaatgttgtcaaaagtttcggaaagcgtcataatgcccaaaacgctcagagaagaatcatccgacaaatctttaagaacaattttctgaaaatgaaggtctttaaaatcacccagctttatgatttctttttgaacaaccgtttctttttttgagctgaagttttgataatttttctccagacctacagtcgaaggttttacagtaggaatctgtgctttaagagctgaaaaaatgataataaaaaatgctgaaataattgttttcttcataagaggtggttattatttatgttttttaaaaatgctgaaattacagaaaaattgggaattgattagtaaacagaatcatttttttaataaaattctcaacgcgactgtggatcaaaatgagctttaaaagtaagataatcttcttttttatcttccgcaatttccaaaaattcatgatattcttcagggtgctttcccatataagtcatcacaattgcaagattgacgaatagatttttatctgctgaacccagattcaatgcttgataaagatattttaaagcctgctcgtcttctcccatatcagaatagattgcaccgatattaattaaagcggaagtattttccggttcaagcgctaaaatttcatccagttctttgattaaaagatcgttaattgcatcccaatgatcttcattttcccatctttttgcctggagtttttttacgttttctagtctgtgggttgtgttattcataccgcaaaattatgaaattgtaaatgtttatttatgtttttcaaataaccattttggaatttcatctgtaattagaaatggaatcacaatattattatgatgaagatttgtaaaagttgtaaaaatcaaatttttgtcagacgaaagtttattgtataactcaacgctgccaatgtatggattttcatcattaaatcagtgataaacttaacataataaaatttcacgtttatttgatttatatagtttctactttttatatatttgccttgttactaaaaaataattcatcatgagaaatttcaaaaagctctcaagagaaaagttaaaaaaccttaacggaggtaaactttatggaggttcttgcgcaattaaagttacagttaacggcgttactgaagttcacaatcaatacttcggaggtacaacaaaccagcaagtatttgatagtgcaaatgtagcatgtgtaaaagcattacaaaatgcgaatgtaacaagatgtcagtatgactgcgcttatgatggctacggtaactaatcgattaatcatcaaatcaggcaggttaataaacctgctttttttattcattatattcaattgtagtaaagcatccgagcatagcactaggagtgccgtcataaaaaagaatgttacgcagcatgatgaggtcaaaagcgattctttagaaataactttaaaaaatattcctgcgaaaactgatgtcagcttgatttataatgataagaacctaaacacggcgtatataaattttgaaaacaaatcaaataacaatcaatccattactaaaaagatatcgaaggtaacagattttaattacacccttcgctatagaagtttttctactataaacaataaattgcaaacgcattatcatgactattttgtagaccgcgcaacgcaaaaaattgaactcatatttaatgataaaaatggcgatatagaattaaaaaatcatgatggaaatgttttaatatatgatgatatttataattcttatcaggaaataacgagcagaaaaaatcgcattaaaccggctgaaaaaattcttcaaatagaaaaactacactcggactatcaaaagaaatttaatgatgtcgcaagaatttctataaatgatcttgtattttatagccagttatccctgctttcaccgaatgataagaaaatagaaaattatttggagaacatttcatctcctctttggagtaatgatttattgggactagtgtctcaatacttgaaaactaaaaaagaaaatatttatcagctaaatttaaataaaagcaaaaatgacatatataatgatcttatagaattgggtgtaggatggcatttacagcaatacaaggaacagaaatatgcaagctacaataaaaatgtagaatggtttaagaataccccttattacagtaaaaataaggagacactagacaaagtattacaaaccgataataagcaaaaatctattaaagacgaccttttatcatttgatatatacaaagaagataaagttacgaagctggagagcgctatttctggacaaaaatctgaatactatctgcttgatttttgggcaacttggtgtgcaccttgcctgcaaaatattgaagccatacacagcatggatttaccacagggcttggaaattatttctattagcatggacagaacatcaaacagagagaaatgggcgaagaaatcagaagatttcaagctagcgaattcttatctttttgttgaaagtcaaaacaataaaaatatcatcaaaaaaattagtttaaaccaattaccgagatacattttaatagataagaattttaatgttctaaaccctaatttaccaacgccgcaagaagctgattttttaaaagaattaaaaatatatataaaaaaacaatgataccaaacgaaattttattaggattttcaacgtattgattccaataaaaatgtttgattgacatgatcttatttacaaaataatcgatcatttctttattgttactaaagcctacatcaccatcaattctttttgatctaaaataaaaccattaagctcaataacttaatggttttataaatgtttttatccaaacgccctcttcagcaaactttccactttcggttcacttcctctgaaattcttatacagttccatcggatcttttgtgccgccggaagaaagaagaactttgtattttgcagcaatttcaggattgaaaattccgttttccttgaaatattgaaacgcgtctgcatccagaacttccgcccatttgtaagaataatatcccgcagaatatccaccctggaaaatatgtgaaaaactcggactcatcgccgtttcaggatttgaaggatataactgtgttgcttttgtgtattcatcttcaaactccttcacactcttattctccaactctccgactttcgtatggtaattcatgtccagtaatccgaaaccaagctgtctcaacgtctgataaccttccatgaagttttttgactgtgcaattttttcaattttttcatccggcaaaacttctcctgttttataatgtttcgcgaatgtttttaagaattccggttcgtagcagaaattttccagaaactgagaaggcagctccacgaaatcccattttacggaagttccggaaagagtagggtactgcgtatcggcaagcattccgtgaagggcgtgaccaaattcatggaataaagtagtcacttcctgaaacgttagtaaacttggagtatccttcgtcggcttactgaaattacaaacgatagaaatatgaggacgggaattttcgccgtcttttttgtattgatttttatagctcgtcatccaggctcccgctcttttgccttttcgagggaaataatctacataaagcagcgctttgaaagttttttcagaatggttgcttccatcttccatcttcccgctccctgtttcaaatacctcataaacctttacctcttcatgatatttcggaatatcgtttctttcctcaaaagttaatccaaaaagttgttctgccaatccgaaaaccgcatcctgaacctgatttaaaggaaaataaggctttaattcttcatcattaagatcatattttgctttacggagtttttcagcataaaaagcgtggtcatagccttgcatttcctcaattccgtcagcttttgccaaagatttcaactcttcaatttctttatcggcatagggttttgctttggttaaaagttcgttcagaaaatctataacttttgttggcgattttgccattctttcctccagaacgtaatctgcataatttttatagcctaataattccgctttttgctgttttaaattcagcaattctttaattaaattctgattatcaaattctccgccgtcgaaagattttttgccgtttgccaaagcaatttcctttctcaattcgcggttttcagcatatgtcatgaacggaatgtaacttggatattgcagcgttactacccatccttccagatttctttctttggcttcttctgcgtattgttccagaatagcttccggaattcccgcaagatcttctttattggtgatatgtttaaaataattattcgtcgaagccaacacattttgcccgaactgaagtgattttaaagacaaatccatgctgattttctttaatttctctttgtcttcttcatttaataaagcaccgcttctcacaaaacctttgtacgtttcattcagaagcatttcctgctcttcgttgaggttatatttctctttttcatcgtacacttttttaattttactgaaaagggcttcgttttgagaaatttttgaagaatattctgttaaaatcggagaaacttcctgtgcgatcttttggatttcatcgctggtttctgccgaatttaaattgaaaaatatattggaaaccacatcaagctgttcaccggaataagccaatgcttcaattacattttcgaaagtcggggcatcctgattatcaacgatagcgttaatttcttcttcagatttctgaattaaatctttaaaagctggaaggtaatcttcgtttctgatcttattaaatggagctgaatgatatggtgtggtaaatttttctgttaaaatattcatattctgatttttaattattgtaaatttaatgattctcaggaaccgacagcgaaaaagctcaaaaatgatgcctgaaaagaagttgtgacaaaattgatattattgtataatcttgtcatatggaaagttaatatgaagccagattgattaattttgacagcaaattgaagtgtccttatcataaaaattataaccctaaattttaataacgatgaaaaaatttttaaaagttcttggtatcattttactattaattgttgtttatgctttaatcgcaatggtggcattcggcaaaaattatcattacgaaaaatccatggtgatgaatgctccgaaagagaaagtctggaaacagatcagttccatgaaagcctttaatcagtggaatccgtggatgaagctggatccgaatatgaaaattgtgtattccggaaacgaaggtcaggttggagataagtattgttgggacagcaaaaatgatgatgcaggagcaggttgtcaggaaataaaagagttggttacagaccaaaagcagaaaacagaaatgatttttgaaagaccttttgcaggacaggcaacctcagaaatcacgttgtctccagaaggaaacggaacaaaagtaacctggacgatggatacagagcaggatccgatgatgaaaataatgcggccgatgatggattaccaaatgggaaaatcttatgaagaaggtctgaataatctgaagaaattagtcgaaaaataaagaatttgtttaagctaaaaataaattaaagccttgtgaaattactcgcaaggcttttttatttaatattctttttgacctatttcattaattgaattgtaatttccttcacctttcggattgggaccatattcattcgggccatggtcgctatctgcaaataacatccaaagggaataaaagggaatgatttggaaccatcctgaatttcctctgtcgtgacatctttttgctccttgtgctaacataaaccacactaaaggaataagcaataataaaaagataatgagaacaactcctgaaggttcttcattattattaatattaaaataaaaattgaagggaacagaaaatactaaatagataagatagtccatactctgttcttctgattcttccctcgaaagaaaatggtgctttaaacatggtatttttagtttttattcgttaaaaaaacaaatgtagaaattattttaaaatttcagcaccatatttggaattgttattttatgttaagccgaataagaattattgaaaaaatattatctttatataaagatttgatgtatggagaagaccgtatttgagaaaaacaacataagaaattatgtaaaaaacgtgattgccgaaaagatcgaaaaattaaaaaacttcatagaatttacattagaagcaagtcgcgacatcaaaaagactccgaaatatgacagcatgagagaagagatgcaggaagagatctaccagatgcagcgtcagttgggagcgttaaacgatttaaaaagaaatatggctaaagtcctgaataattccaccgaaaaagttcagttgggatctttggtcattacgaataaagcaaggttttatatttcggtttccttgggagaattcttttttgaaggcgaccggttctatgccatttcttccgaaagtccgatggcaaagaaaatgatgggcatgaaacccggcgatgaatttacactgaataaaattcaccagaaaattattgaggtcatttaataatgatgaatgatgaatttttcaaactaaacacttgctgtcattctgaatagagcgcagcggagtgaagaatctatttagtgatattaacgttgaatattcgtaagaacgacaaataaacttttgaaataaacggatactctaaattatcaataactaaaaactatcagccatcaatagtcagccatcaactttttcgtaattttgccctcatgaataaagcagaagttttaaaagaaattatagagcaaagaagaagtatattcccgaaagattattcggatactgaaatttcacaggaaattcttgacgaaattttacattcggcaacgttagctcccaatcataaacgtacaaaaccctggcgtttcaaaactttcagaggggaagaaaaagcaaaactggctttagaaatgcagtcgatttacaaatctacccaacccgaaacactttttttagaaaaaaaatacaacgatattggttttaaaatcaataaagcagataccgtagtttccattgttgtcaatttcagcggaatggttccggaatgggaagaaatcgcagcggtttccatggcggttcagaatatgtatcttacctgtactgcaaataatatcggatgttactggagttctccgaaaattgtagaccatctgaaagaatctttaaccattgaagaaaaccagaagtgtttagggtttctgtatatgggtaatcttgattagatcaaaagatttttctgaactttttagtttcggcgcggcttcgccgcgccggaatccaaggaaaaagcgagtagtgagagcaggttcccggctccaaaaatagagaatttgtaaaactttttatccgaagctttttactttaaacttttttattatctttgcactcttaaatatttaactgggacgagttcccgtaaaattcaaacattatgtcagtaaaaatcagattacaaagacacggatctaaaggaagaccttttttccacatcgtggttgcagattctagagcaagaagagatggtaaattcatcgagaaactaggaacatacaacccaattacaaaccctgcaactatcgatttgaacgttgattctgctgtaaagtggttaaacaacggtgctcagccaactgatactgcaagagctattctttcttacaaaggagcgctttacaaaaaacacttacaaggtggtgttgctaaaggagcttttgatgaggctgaagctgaaaaaagattcaatgcttgggtagaagctaaagaagctaaagtacaaggtaaagtggacggtttggctactgctaaatctgatgctaaaaaagctgctttagaagctgaagctaaagtaaacgaagctagagttgctgctgctgcacaggctgaagcagacgctaaagctgctgaagaagctgcaaatgcacctgctgaagaaactacagaaggagaagctgctgctgaatctacagaagaaaatactgaagcttaagaaaaatccggtatgcgtaaagaagattgctatttattaggaaaaatcacacgcagacacggacttgcgggaaacgttatccttaaactggataccgatcaacccgagctttacaataaactggaatcaatattcgttg
